(19) United States
(12) Patent Application Publication
(10) Pub. No.: US 2008/0207483 A1
(43) Pub. Date: Aug. 28, 2008

(54) Methods and compositions for diagnosis and therapy of cancer based on hyper-mutated tumor genes

(75) Inventor: Stefano Volinia, Ferrara (IT)

Correspondence Address: STEFANO VOLINIA, CORSO PIAVE 17, FERRARA, 44100, IT

(73) Assignee: Dr. Stefano Volinia, Ferrara (IT)

(21) Appl. No.: 11/333,076

(22) Filed: Jan. 17, 2006

Related U.S. Application Data
(60) Provisional application No. 60/593,456, filed on Jan. 16, 2005.

(51) Int. Cl. A61K 38/02; C12Q 1/68; C40B 30/04

(52) U.S. Cl. 514/2; 435/6; 506/9

(57) ABSTRACT

The present invention provides novel methods and compositions for the diagnosis and treatment of cancers. The invention also provides methods of identifying inhibitors of tumorigenesis.

### BACKGROUND OF THE INVENTION

[0001] Cancer, the uncontrolled growth of malignant cells, is a major health problem of the modern medical era and is one of the leading causes of death in developed countries. In the United States, one in four deaths is caused by cancer (Jemal, A. et al., CA Cancer J. Clin. 52:23-47 (2002)). Among cancers, those that arise from organs and solid tissues, known as cancers (e.g., colon cancer, lung cancer, breast cancer, stomach cancer, prostate cancer, pancreatic cancer) are among the most-commonly identified human cancers.

[0002] For example, prostate cancer is the most frequently diagnosed noncutaneous malignancy among men in industrialized countries, and, in the United States, 1 in 8 men will develop prostate cancer during his life (Simard, J. et al., Endocrinology 743(6):2029-40 (2002)). The incidence of prostate cancer has dramatically increased over the last decades and prostate cancer is now a leading cause of death in the United States and Western Europe (Peschel, R. E. and J. W. Colberg, Lancet 4:233-41 (2003); Nelson, W. G. et al., N. Engl. J. Med. 349(4):366-81 (2003)). An average 40% reduction in life expectancy affects males with prostate cancer. If detected early, prior to metastasis and local spread beyond the capsule, prostate cancer can often times be cured (e.g., using surgery). However, if diagnosed after spread and metastasis from the prostate, prostate cancer is typically a fatal disease with low cure rates. While prostate-specific antigen (PSA)-based screening has aided early diagnosis of prostate cancer, it is neither highly sensitive nor specific (Punglia et. al., N Engl J Med. 349(4):335-42 (2003)). This means that a high percentage of false negative and false positive diagnoses are associated with the test. The consequences are both many instances of missed cancers and unnecessary follow-up biopsies for those without cancer.

[0003] Breast cancer remains the second leading cause of cancer-related deaths in women, affecting more than 180,000 women in the United States each year. For women in North America, the life-time odds of getting breast cancer are now one in eight. Although the discovery of BRCA1 and BRCA2 were important steps in identifying key genetic factors involved in breast cancer, it has become clear that mutations in BRCA1 and BRCA2 account for only a fraction of inherited susceptibility to breast cancer (Nathanson, K. L. et al., Human Mol. Gen. 70(7):715-720 (2001); Anglican Breast Cancer Study Group. Br. J. Cancer 83(10): 1301-08 (2000); and Syrjakoski K., et al., J. Natl. Cancer Inst. 92:1529-31 (2000)). Despite considerable research into therapies for breast cancer, breast cancer remains difficult to diagnose and treat effectively, and the high mortality observed in breast cancer patients indicates that improvements are needed in the diagnosis, treatment and prevention of the disease.

[0004] Excluding skin cancer, colorectal cancer is the third most frequently diagnosed cancer in the United States and Canada (after lung and breast in women, and lung and prostate in men). The American Cancer Society estimates that there will be approximately 145,000 new cases of colorectal cancer diagnosed in the U.S. in 2005 (Cancer Facts and Figures 2005. Atlanta, Ga.: American Cancer Society, 2005. Available at www.cancer.org/docroot/STT/stt_{—}0.asp, accessed Dec. 19, 2005). Colorectal cancer is the second leading cause of cancer death among men and women in the United States and Canada (after lung cancer).

[0005] The annual incidence of pancreatic cancer is nearly equivalent to the annual mortality, estimated to be 31,860 and 31,270, respectively, in the U.S. in 2004 (Cancer Facts and Figures 2004. Atlanta, Ga.: American Cancer Society, 2004. Available at www.cancer.org/docroot/STT/stt_{—}0_{—}2004.asp, accessed Aug. 21, 2005). Patients with locally advanced and metastatic pancreatic cancer have poor prognoses, and diagnosis generally occurs too late for surgery or radiotherapy to be curative (Burr, H. A., et al., The Oncologist 10(3): 183-190, (2005)). Chemotherapy can provide relief of symptoms for some patients with advanced pancreatic cancer, but its impact on survival has been modest to date.

[0006] In the United States, more than 20,000 individuals are diagnosed with stomach (gastric) cancer each year. The American Cancer Society estimates that there will be 22,710 new cases of colorectal cancer diagnosed in the U.S. in 2004 (Cancer Facts and Figures 2004. Atlanta, Ga.: American Cancer Society, 2004. Available at www.cancer.org/docroot/STT/stt_{—}0_{—}2004.asp, accessed Aug. 21, 2005). Because stomach cancer may occur without symptoms, it may be in advanced stages by the time the diagnosis is made. Treatment is then directed at making the patient more comfortable and improving quality of life.

[0007] Lung cancer causes more deaths worldwide than any other form of cancer (Goodman, G. E., Thorax 57994-999 (2002)). In the United States, lung cancer is the primary cause of cancer death among both men and women. In 2002, the death rate from lung cancer was an estimated 134,900 deaths, exceeding the combined total for breast, prostate and colon cancer. Id. Lung cancer is also the leading cause of cancer death in all European countries, and numbers of lung cancer-related deaths are rapidly increasing in developing countries as well.

[0008] The five-year survival rate among all lung cancer patients, regardless of the stage of disease at diagnosis, is only about 13%. This contrasts with a five-year survival rate of 46% among cases detected while the disease is still localized. However, only 16% of lung cancers are discovered before the disease has spread. Early detection is difficult as clinical symptoms are often not observed until the disease has reached an advanced stage. Despite research into therapies for this and other cancers, lung cancer remains difficult to diagnose and treat effectively. Clearly, the identification of markers and genes that are responsible for susceptibility to particular forms of solid cancer (e.g., prostate cancer, breast cancer, lung cancer, stomach cancer, colon cancer, pancreatic cancer) is one of the major challenges facing oncology today. There is a need to identify means for the early detection of individuals that have a genetic susceptibility to cancer so that more aggressive screening and intervention regimens may be instituted for the early detection and treatment of cancer. Cancer genes may also reveal key molecular pathways that may be manipulated (e.g., using small or large molecule weight drugs) and may lead to more effective treatments regardless of the cancer stage when a particular cancer is first diagnosed.

[0009] A variety of approaches have been applied to the identification of cancer genes. Procedures were developed that have allowed identification of genes causative of cellular transformation (Reddy, E. P., Reynolds, R. K., Santos, E. & Barbacid, M. Nature 300, 149-152 (1982); Tabin, C. J. et al. Nature 300, 143-149 (1982)), and of complex processes such as invasiveness and metastasis (Douma, S. et al. Nature. 430:1034-9 (2004)). In vitro methods, using cellular or animal models, led to the discovery of dominant cancer genes, or oncogenes. Many well-characterised cancer genes harbour somatic base substitutions or small insertion/deletions. For example, coding regions frame-shifts and point mutations account for 75% of the somatic mutations in the two major TP53 tumour suppressor genes (Olivier M. et al. Hum Mutat. 19:607-14 (2002); Stenson P. D. et al. Hum Mutat 21:577-81 (2003)). Large-scale sequencing approaches identified PI3K and some tyrosine phosphatases as somatically mutated in human colorectal cancer (Wang, Z. et al. Science 304:1164-6 (2004)). The B-raf oncogene, first described over 20 years ago, was recently shown to be mutated in human cancer (Garnett, M. & Marais, R. Cancer Cell 16:313-319 (2004)). On the other hand, other cancer genes have been discovered through the phenomenon of inherited predisposition. Familial cancer is rare in comparison to non-hereditary cancer, but a number of recessive, or tumour-suppressor, genes have been identified using linkage analysis (Friend, S. H. et al. Nature 323: 643-646 (1986); Breast Cancer Linkage Consortium. Lancet 349: 1505-1510 (1997)). A number of efforts are currently underway to build integrated databases to enable sequence-based cancer genomics (Strausberg, R., L., Simpson A., J., & Wooster, R. Nat Rev Genet. 4:409-418 (2003)). Recently, Futreal et al (Futreal, P. A. et al. Nat Rev Cancer 4:177-83 (2004)) conducted a census from the literature of the genes that are mutated and causally implicated in cancer development, indicating that 299 genes contribute to human cancer. However 70% of these genes are associated with leukaemia, lymphomas and mesenchymal tumours, which account for only 10% of total cancer incidence. Furthermore, about 75% of genes in the census are associated with translocations and while at least 90% of them are dominant at the cellular level (i.e. activated oncogenes, fusion oncoproteins) 90% of germlne mutations are recessive (Futreal, P. A. et al. Nat Rev Cancer 4:177-83 (2004)). Thus it may be that the majority of cancer genes still remain undiscovered. In particular, for most adult epithelial cancer, the four to seven somatically mutated genes that are usually proposed to be necessary for cancer development have not yet been identified.

[0010] Clearly, there is a great need in the art for improved methods for detecting and treating cancers (e.g., prostate cancer, breast cancer, lung cancer, stomach cancer, colon cancer, pancreatic cancer). The present invention provides novel methods and compositions for the diagnosis and treatment of cancers.

### SUMMARY OF THE INVENTION

[0011] The present invention is based, in part, on the identification of specific genes that have altered genetic structure (i.e. nucleotide sequence or genomic structure) in particular cancers. A novel and systematic approach was devised and applied it to the identification of the genes that are mutated in naturally occurring human cancer. More than 3×10⁹ nucleotides of human coding sequence were analysed from over 5,600,000 expression sequence tags (ESTs) derived from both healthy and cancer tissues. ESTs represent single alleles and are unverified sequences; therefore the detected mismatches are the sum of true mutations and sequencing artefacts. Previous investigators attempted to evaluate sequencing error rate in ESTs (Irizarry, K. et al. Nat. Genet. 26:233-236 (2000)). Here an alternative strategy was followed, based on the assumption that the error rate is identical in the same gene between and within normal and cancer EST libraries.

[0012] Accordingly, the invention encompasses methods of diagnosing whether a subject has, or is at risk for developing, a cancer. According to the methods of the invention, the nucleotide sequence and genomic structure of at least one hypermutated cancer gene product in a test sample from the subject is compared to the nucleotide sequence or genomic structure of a corresponding hypermutated cancer gene product in a control sample. An alteration in the nucleotide sequence or genomic structure of the hypermutated cancer gene product in the test sample, relative to the nucleotide sequence or genomic structure of a corresponding hypermutated cancer gene product in a control sample, is indicative of the subject either having, or being at risk for developing, a cancer. The cancer can be any cancer that arises from organs and tissues. In certain embodiments, the cancer is stomach cancer, breast cancer, pancreatic cancer, colon cancer, lung cancer or prostate cancer. In particular embodiments, the cancer is not breast cancer, lung cancer, prostate cancer, pancreatic cancer or gastrointestinal cancer.

[0013] In one embodiment, the at least one cancer gene product assayed in the test sample is selected from the group consisting of NM_{—}001273, NM_{—}080921, NM_{—}014865, NM_{—}003072, NM_{—}004104, NM_{—}004990, NM_{—}004599, NM_{—}013417, NM_{—}172230, NM_{—}148842, NM_{—}021948, NM_{—}014014, NM_{—}001417, NM_{—}002271, NM_{—}005030, NM_{—}182917, NM_{—}001923, NM_{—}005762, NM_{—}005348, NM_{—}001418, NM_{—}002266, NM_{—}012218, NM_{—}002466, NM_{—}005557, NM_{—}000691, NM_{—}001569, NM_{—}001090, NM_{—}201524, NM_{—}002291, NM_{—}002230, NM_{—}001605, NM_{—}017647, NM_{—}002541, NM_{—}005438, NM_{—}133645, XM_{—}290401, NM_{—}000968, NM_{—}144733, NM_{—}004741, NM_{—}020414, NM_{—}004793, NM_{—}000224, NM_{—}006819, XM_{—}379877, NM_{—}001436, NM_{—}004247 and combinations thereof. In another embodiment, the at least one cancer gene product assayed in the test sample is selected from the group consisting of NM_{—}001273, NM_{—}080921, NM_{—}014865, NM_{—}003072, NM_{—}004104, NM_{—}004990, NM_{—}004599, NM_{—}013417, NM_{—}172230, NM_{—}148842, NM_{—}021948, NM_{—}014014, NM_{—}001417, NM_{—}002271, NM_{—}005030, NM_{—}182917, NM_{—}001923, NM_{—}005762, NM_{—}005348, NM_{—}001418, NM_{—}002266, NM_{—}012218, NM_{—}002466, NM_{—}005557, NM_{—}000691, NM_{—}001569, NM_{—}001090, NM_{—}201524, NM_{—}002291, NM_{—}002230, NM_{—}001605, NM_{—}017647, NM_{—}002541, NM_{—}005438, NM_{—}133645, XM_{—}290401, NM_{—}000968, NM_{—}144733, NM_{—}004741, NM_{—}020414, NM_{—}004793, NM_{—}000224, NM_{—}006819, XM_{—}379877, NM_{—}001436, NM_{—}004247, NM_{—}000967, NM_{—}199413, NM_{—}032044, NM_{—}013403, NM_{—}012469, NM_{—}003169, NM_{—}006470, NM_{—}021991, XM_{—}290506, NM_{—}153280, NM_{—}080686, NM_{—}000289, NM_{—}003875, NM_{—}024658, NM_{—}003074, NM_{—}152298, NM_{—}007126, NM_{—}139215, NM_{—}147200, XM_{—}290345, XM_{—}377464, NM_{—}021873, NM_{—}006429, NM_{—}015292, NM_{—}005956, NM_{—}001940, NM_{—}000526, NM_{—}001747, NM_{—}024311, NM_{—}003938, NM_{—}005336, NM_{—}003751, NM_{—}006839, NM_{—}000937, NM_{—}012112, NM_{—}006739, NM_{—}005916, NM_{—}138421, NM_{—}001379, NM_{—}006289, NM_{—}004939, NM_{—}001357, NM_{—}000422, NM_{—}002417, NM_{—}005968, NM_{—}003754, XM_{—}378197, NM_{—}002473, NM_{—}002972, NM_{—}000546, NM_{—}001102, XM_{—}374522, NM_{—}001458, NM_{—}172020, XM_{—}039701, NM_{—}000701, NM_{—}002298, NM_{—}015179, NM_{—}002967, NM_{—}018454, NM_{—}006796, NM_{—}005558, NM_{—}006812, NM_{—}003400, NM_{—}001034, NM_{—}004728, NM_{—}178313, NM_{—}145714, XM_{—}085722, NM_{—}001798, NM_{—}181054, NM_{—}001916, NM_{—}002668, NM_{—}052963, NM_{—}031243, NM_{—}002638, NM_{—}003146, NM_{—}005564, NM_{—}016292, XM_{—}375253, NM_{—}003815, NM_{—}001363, NM_{—}032271, NM_{—}000314, NM_{—}198830, NM_{—}032999, NM_{—}015935, NM_{—}134447, NM_{—}006928, NM_{—}014390, NM_{—}020117, NM_{—}001619, NM_{—}022820, NM_{—}005526, NM_{—}033500, NM_{—}001903, NM_{—}004844, NM_{—}006372, NM_{—}022743, NM_{—}007355, NM_{—}012426, NM_{—}000088, NM_{—}182926, NM_{—}004563, NM_{—}014612, NM_{—}004446, XM_{—}168585, NM_{—}014173, NM_{—}144596, NM_{—}138925, NM_{—}174889, NM_{—}006452, NM_{—}004689, NM_{—}015315, XM_{—}379904, NM_{—}014753, NM_{—}198309, NM_{—}002810, NM_{—}002388, NM_{—}014938, NM_{—}018031, NM_{—}023007, NM_{—}002362, NM_{—}006088, NM_{—}002014, NM_{—}003823, NM_{—}030877, NM_{—}003752, NM_{—}001456, NM_{—}006286, NM_{—}145685, NM_{—}003103, NM_{—}002265, NM_{—}005915, XM_{—}376630, NM_{—}006295, NM_{—}145810, NM_{—}015456 and combinations thereof.

[0014] The nucleotide sequence and gene structure of the at least one cancer gene product can be assayed using a variety of techniques that are well known to those of skill in the art (e.g., DNA sequencing, cloning, quantitative or semi-quantitative PCR and RT-PCR, Southern blot analysis, Northern blot analysis, Western blot analysis, solution hybridization detection). In a particular embodiment, the nucleotide sequence and structure of at least one cancer gene product is assayed by labeling genomic DNA from a test sample obtained from the subject to provide a set of target oligodeoxynucleotides, hybridizing the target oligodeoxynucleotides to one or more cancer gene-specific probe oligonucleotides (e.g., hybridizing to a microarray that comprises several cancer gene-specific probe oligonucleotides) to provide a hybridization profile for the test sample, and comparing the test sample hybridization profile to a hybridization profile from a control sample. An alteration in the signal of at least one cancer gene in the test sample relative to the control sample is indicative of the subject either having, or being at risk for developing, a cancer.

[0015] In another embodiment, the nucleotide sequence and structure of at least one cancer gene product is assayed by reverse transcribing RNA from a test sample obtained from the subject to provide a set of target oligodeoxynucleotides, hybridizing the target oligodeoxynucleotides to one or more cancer gene-specific probe oligonucleotides (e.g., hybridizing to a microarray that comprises several cancer gene-specific probe oligonucleotides) to provide a hybridization profile for the test sample, and comparing the test sample hybridization profile to a hybridization profile from a control sample. An alteration in the signal of at least one cancer gene in the test sample relative to the control sample is indicative of the subject either having, or being at risk for developing, a cancer.

[0016] In a particular embodiment, target oligonucleotides are hybridized to a microarray comprising cancer gene-specific probe oligonucleotides for one or more cancer genes selected from the group consisting of NM_{—}001273, NM_{—}080921, NM_{—}014865, NM_{—}003072, NM_{—}004104, NM_{—}004990, NM_{—}004599, NM_{—}013417, NM_{—}172230, NM_{—}148842, NM_{—}021948, NM_{—}014014, NM_{—}001417, NM_{—}002271, NM_{—}005030, NM_{—}182917, NM_{—}001923, NM_{—}005762, NM_{—}005348, NM_{—}001418, NM_{—}002266, NM_{—}012218, NM_{—}002466, NM_{—}005557, NM_{—}000691, NM_{—}001569, NM_{—}001090, NM_{—}201524, NM_{—}002291, NM_{—}002230, NM_{—}001605, NM_{—}017647, NM_{—}002541, NM_{—}005438, NM_{—}133645, XM_{—}290401, NM_{—}000968, NM_{—}144733, NM_{—}004741, NM_{—}020414, NM_{—}004793, NM_{—}000224, NM_{—}006819, XM_{—}379877, NM_{—}001436, NM_{—}004247, NM_{—}000967, NM_{—}199413, NM_{—}032044, NM_{—}013403, NM_{—}012469, NM_{—}003169, NM_{—}006470, NM_{—}021991, XM_{—}290506, NM_{—}153280, NM_{—}080686, NM_{—}000289, NM_{—}003875, NM_{—}024658, NM_{—}003074, NM_{—}152298, NM_{—}007126, NM_{—}139215, NM_{—}147200, XM_{—}290345, XM_{—}377464, NM_{—}021873, NM_{—}006429, NM_{—}015292, NM_{—}005956, NM_{—}001940, NM_{—}000526, NM_{—}001747, NM_{—}024311, NM_{—}003938, NM_{—}005336, NM_{—}003751, NM_{—}006839, NM_{—}000937, NM_{—}012112, NM_{—}006739, NM_{—}005916, NM_{—}138421, NM_{—}001379, NM_{—}006289, NM_{—}004939, NM_{—}001357, NM_{—}000422, NM_{—}002417, NM_{—}005968, NM_{—}003754, XM_{—}378197, NM_{—}002473, NM_{—}002972, NM_{—}000546, NM_{—}001102, XM_{—}374522, NM_{—}001458, NM_{—}172020, XM_{—}039701, NM_{—}000701, NM_{—}002298, NM_{—}015179, NM_{—}002967, NM_{—}018454, NM_{—}006796, NM_{—}005558, NM_{—}006812, NM_{—}003400, NM_{—}001034, NM_{—}004728, NM_{—}178313, NM_{—}145714, XM_{—}085722, NM_{—}001798, NM_{—}181054, NM_{—}001916, NM_{—}002668, NM_{—}052963, NM_{—}031243, NM_{—}002638, NM_{—}003146, NM_{—}005564, NM_{—}016292, XM_{—}375253, NM_{—}003815, NM_{—}001363, NM_{—}032271, NM_{—}000314, NM_{—}198830, NM_{—}032999, NM_{—}015935, NM_{—}134447, NM_{—}006928, NM_{—}014390, NM_{—}020117, NM_{—}001619, NM_{—}022820, NM_{—}005526, NM_{—}033500, NM_{—}001903, NM_{—}004844, NM_{—}006372, NM_{—}022743, NM_{—}007355, NM_{—}012426, NM_{—}000088, NM_{—}182926, NM_{—}004563, NM_{—}014612, NM_{—}004446, XM_{—}168585, NM_{—}014173, NM_{—}144596, NM_{—}138925, NM_{—}174889, NM_{—}006452, NM_{—}004689, NM_{—}015315, XM_{—}379904, NM_{—}014753, NM_{—}198309, NM_{—}002810, NM_{—}002388, NM_{—}014938, NM_{—}018031, NM_{—}023007, NM_{—}002362, NM_{—}006088, NM_{—}002014, NM_{—}003823, NM_{—}030877, NM_{—}003752, NM_{—}001456, NM_{—}006286, NM_{—}145685, NM_{—}003103, NM_{—}002265, NM_{—}005915, XM_{—}376630, NM_{—}006295, NM_{—}145810, NM_{—}015456 and combinations thereof.

[0017] The invention also encompasses methods of inhibiting tumorigenesis in a subject who has, or is suspected of having, a cancer (e.g., liver cancer, head and neck cancer, prostate cancer, stomach cancer, pancreatic cancer, lung cancer, breast cancer, colon cancer, lymphoma, leukemia, sarcomas), wherein at least one cancer gene product is altered in its nucleotide sequence or genomic structure in the cancer cells of the subject. When the at least one isolated cancer gene product is altered in the cancer cells, the method comprises administering an effective amount of an isolated cancer gene product, an isolated variant or a biologically-active fragment of the cancer gene product or variant, such that proliferation of cancer cells in the subject is inhibited. In a further embodiment, the at least one isolated cancer gene product is selected from the group consisting of NM_{—}001273, NM_{—}080921, NM_{—}014865, NM_{—}003072, NM_{—}004104, NM_{—}004990, NM_{—}004599, NM_{—}013417, NM_{—}172230, NM_{—}148842, NM_{—}021948, NM_{—}014014, NM_{—}001417, NM_{—}002271, NM_{—}005030, NM_{—}182917, NM_{—}001923, NM_{—}005762, NM_{—}005348, NM_{—}001418, NM_{—}002266, NM_{—}012218, NM_{—}002466, NM_{—}005557, NM_{—}000691, NM_{—}001569, NM_{—}001090, NM_{—}201524, NM_{—}002291, NM_{—}002230, NM_{—}001605, NM_{—}017647, NM_{—}002541, NM_{—}005438, NM_{—}133645, XM_{—}290401, NM_{—}000968, NM_{—}144733, NM_{—}004741, NM_{—}020414, NM_{—}004793, NM_{—}000224, NM_{—}006819, XM_{—}379877, NM_{—}001436, NM_{—}004247, NM_{—}000967, NM_{—}199413, NM_{—}032044, NM_{—}013403, NM_{—}012469, NM_{—}003169, NM_{—}006470, NM_{—}021991, XM_{—}290506, NM_{—}153280, NM_{—}080686, NM_{—}000289, NM_{—}003875, NM_{—}024658, NM_{—}003074, NM_{—}152298, NM_{—}007126, NM_{—}139215, NM_{—}147200, XM_{—}290345, XM_{—}377464, NM_{—}021873, NM_{—}006429, NM_{—}015292, NM_{—}005956, NM_{—}001940, NM_{—}000526, NM_{—}001747, NM_{—}024311, NM_{—}003938, NM_{—}005336, NM_{—}003751, NM_{—}006839, NM_{—}000937, NM_{—}012112, NM_{—}006739, NM_{—}005916, NM_{—}138421, NM_{—}001379, NM_{—}006289, NM_{—}004939, NM_{—}001357, NM_{—}000422, NM_{—}002417, NM_{—}005968, NM_{—}003754, XM_{—}378197, NM_{—}002473, NM_{—}002972, NM_{—}000546, NM_{—}001102, XM_{—}374522, NM_{—}001458, NM_{—}172020, XM_{—}039701, NM_{—}000701, NM_{—}002298, NM_{—}015179, NM_{—}002967, NM_{—}018454, NM_{—}006796, NM_{—}005558, NM_{—}006812, NM_{—}003400, NM_{—}001034, NM_{—}004728, NM_{—}178313, NM_{—}145714, XM_{—}085722, NM_{—}001798, NM_{—}181054, NM_{—}001916, NM_{—}002668, NM_{—}052963, NM_{—}031243, NM_{—}002638, NM_{—}003146, NM_{—}005564, NM_{—}016292, XM_{—}375253, NM_{—}003815, NM_{—}001363, NM_{—}032271, NM_{—}000314, NM_{—}198830, NM_{—}032999, NM_{—}015935, NM_{—}134447, NM_{—}006928, NM_{—}014390, NM_{—}020117, NM_{—}001619, NM_{—}022820, NM_{—}005526, NM_{—}033500, NM_{—}001903, NM_{—}004844, NM_{—}006372, NM_{—}022743, NM_{—}007355, NM_{—}012426, NM_{—}000088, NM_{—}182926, NM_{—}004563, NM_{—}014612, NM_{—}004446, XM_{—}168585, NM_{—}014173, NM_{—}144596, NM_{—}138925, NM_{—}174889, NM_{—}006452, NM_{—}004689, NM_{—}015315, XM_{—}379904, NM_{—}014753, NM_{—}198309, NM_{—}002810, NM_{—}002388, NM_{—}014938, NM_{—}018031, NM_{—}023007, NM_{—}002362, NM_{—}006088, NM_{—}002014, NM_{—}003823, NM_{—}030877, NM_{—}003752, NM_{—}001456, NM_{—}006286, NM_{—}145685, NM_{—}003103, NM_{—}002265, NM_{—}005915, XM_{—}376630, NM_{—}006295, NM_{—}145810, NM_{—}015456 and combinations thereof. When the at least one isolated cancer gene product is activated in the cancer cells, the method comprises administering to the subject an effective amount of at least one compound for inhibiting activity of the at least one cancer gene product (referred to herein as a “cancer gene activity-inhibition compound”), such that proliferation of cancer cells in the subject is inhibited. In a particular embodiment, the at least one cancer gene activity-inhibition compound is specific for a cancer gene product selected from the group consisting of NM_{—}001273, NM_{—}080921, NM_{—}014865, NM_{—}003072, NM_{—}004104, NM_{—}004990, NM_{—}004599, NM_{—}013417, NM_{—}172230, NM_{—}148842, NM_{—}021948, NM_{—}014014, NM_{—}001417, NM_{—}002271, NM_{—}005030, NM_{—}182917, NM_{—}001923, NM_{—}005762, NM_{—}005348, NM_{—}001418, NM_{—}002266, NM_{—}012218, NM_{—}002466, NM_{—}005557, NM_{—}000691, NM_{—}001569, NM_{—}001090, NM_{—}201524, NM_{—}002291, NM_{—}002230, NM_{—}001605, NM_{—}017647, NM_{—}002541, NM_{—}005438, NM_{—}133645, XM_{—}290401, NM_{—}000968, NM_{—}144733, NM_{—}004741, NM_{—}020414, NM_{—}004793, NM_{—}000224, NM_{—}006819, XM_{—}379877, NM_{—}001436, NM_{—}004247, NM_{—}000967, NM_{—}199413, NM_{—}032044, NM_{—}013403, NM_{—}012469, NM_{—}003169, NM_{—}006470, NM_{—}021991, XM_{—}290506, NM_{—}153280, NM_{—}080686, NM_{—}000289, NM_{—}003875, NM_{—}024658, NM_{—}003074, NM_{—}152298, NM_{—}007126, NM_{—}139215, NM_{—}147200, XM_{—}290345, XM_{—}377464, NM_{—}021873, NM_{—}006429, NM_{—}015292, NM_{—}005956, NM_{—}001940, NM_{—}000526, NM_{—}001747, NM_{—}024311, NM_{—}003938, NM_{—}005336, NM_{—}003751, NM_{—}006839, NM_{—}000937, NM_{—}012112, NM_{—}006739, NM_{—}005916, NM_{—}138421, NM_{—}001379, NM_{—}006289, NM_{—}004939, NM_{—}001357, NM_{—}000422, NM_{—}002417, NM_{—}005968, NM_{—}003754, XM_{—}378197, NM_{—}002473, NM_{—}002972, NM_{—}000546, NM_{—}001102, XM_{—}374522, NM_{—}001458, NM_{—}172020, XM_{—}039701, NM_{—}000701, NM_{—}002298, NM_{—}015179, NM_{—}002967, NM_{—}018454, NM_{—}006796, NM_{—}005558, NM_{—}006812, NM_{—}003400, NM_{—}001034, NM_{—}004728, NM_{—}178313, NM_{—}145714, XM_{—}085722, NM_{—}001798, NM_{—}181054, NM_{—}001916, NM_{—}002668, NM_{—}052963, NM_{—}031243, NM_{—}002638, NM_{—}003146, NM_{—}005564, NM_{—}016292, XM_{—}375253, NM_{—}003815, NM_{—}001363, NM_{—}032271, NM_{—}000314, NM_{—}198830, NM_{—}032999, NM_{—}015935, NM_{—}134447, NM_{—}006928, NM_{—}014390, NM_{—}020117, NM_{—}001619, NM_{—}022820, NM_{—}005526, NM_{—}033500, NM_{—}001903, NM_{—}004844, NM_{—}006372, NM_{—}022743, NM_{—}007355, NM_{—}012426, NM_{—}000088, NM_{—}182926, NM_{—}004563, NM_{—}014612, NM_{—}004446, XM_{—}168585, NM_{—}014173, NM_{—}144596, NM_{—}138925, NM_{—}174889, NM_{—}006452, NM_{—}004689, NM_{—}015315, XM_{—}379904, NM_{—}014753, NM_{—}198309, NM_{—}002810, NM_{—}002388, NM_{—}014938, NM_{—}018031, NM_{—}023007, NM_{—}002362, NM_{—}006088, NM_{—}002014, NM_{—}003823, NM_{—}030877, NM_{—}003752, NM_{—}001456, NM_{—}006286, NM_{—}145685, NM_{—}003103, NM_{—}002265, NM_{—}005915, XM_{—}376630, NM_{—}006295, NM_{—}145810, NM_{—}015456 and combinations thereof.

[0018] In a related embodiment, the methods of inhibiting tumorigenesis in a subject additionally comprise the steps of determining the nucleotide sequence or genomic structure of at least one cancer gene product in cancer cells from the subject, and comparing that sequence or structure of the cancer gene product in the cells to the level of a corresponding cancer gene product in control cells. If structure of the cancer gene product is altered in cancer cells, the methods further comprise varying the structure of the at least one cancer gene product expressed in the cancer cells. In one embodiment, the amount of the cancer gene product or activity present in the cancer cells is less than the amount of the cancer gene product or activity present in a control cell (e.g., corresponding normal cells), and an effective amount of the cancer gene product, isolated variant or biologically-active fragment of the cancer gene product or variant, is administered to the subject. Suitable hypermutated cancer gene products for this embodiment include NM_{—}001273, NM_{—}080921, NM_{—}014865, NM_{—}003072, NM_{—}004104, NM_{—}004990, NM_{—}004599, NM_{—}013417, NM_{—}172230, NM_{—}148842, NM_{—}021948, NM_{—}014014, NM_{—}001417, NM_{—}002271, NM_{—}005030, NM_{—}182917, NM_{—}001923, NM_{—}005762, NM_{—}005348, NM_{—}001418, NM_{—}002266, NM_{—}012218, NM_{—}002466, NM_{—}005557, NM_{—}000691, NM_{—}001569, NM_{—}001090, NM_{—}201524, NM_{—}002291, NM_{—}002230, NM_{—}001605, NM_{—}017647, NM_{—}002541, NM_{—}005438, NM_{—}133645, XM_{—}290401, NM_{—}000968, NM_{—}144733, NM_{—}004741, NM_{—}020414, NM_{—}004793, NM_{—}000224, NM_{—}006819, XM_{—}379877, NM_{—}001436, NM_{—}004247, NM_{—}000967, NM_{—}199413, NM_{—}032044, NM_{—}013403, NM_{—}012469, NM_{—}003169, NM_{—}006470, NM_{—}021991, XM_{—}290506, NM_{—}153280, NM_{—}080686, NM_{—}000289, NM_{—}003875, NM_{—}024658, NM_{—}003074, NM_{—}152298, NM_{—}007126, NM_{—}139215, NM_{—}147200, XM_{—}290345, XM_{—}377464, NM_{—}021873, NM_{—}006429, NM_{—}015292, NM_{—}005956, NM_{—}001940, NM_{—}000526, NM_{—}001747, NM_{—}024311, NM_{—}003938, NM_{—}005336, NM_{—}003751, NM_{—}006839, NM_{—}000937, NM_{—}012112, NM_{—}006739, NM_{—}005916, NM_{—}138421, NM_{—}001379, NM_{—}006289, NM_{—}004939, NM_{—}001357, NM_{—}000422, NM_{—}002417, NM_{—}005968, NM_{—}003754, XM_{—}378197, NM_{—}002473, NM_{—}002972, NM_{—}000546, NM_{—}001102, XM_{—}374522, NM_{—}001458, NM_{—}172020, XM_{—}039701, NM_{—}000701, NM_{—}002298, NM_{—}015179, NM_{—}002967, NM_{—}018454, NM_{—}006796, NM_{—}005558, NM_{—}006812, NM_{—}003400, NM_{—}001034, NM_{—}004728, NM_{—}178313, NM_{—}145714, XM_{—}085722, NM_{—}001798, NM_{—}181054, NM_{—}001916, NM_{—}002668, NM_{—}052963, NM_{—}031243, NM_{—}002638, NM_{—}003146, NM_{—}005564, NM_{—}016292, XM_{—}375253, NM_{—}003815, NM_{—}001363, NM_{—}032271, NM_{—}000314, NM_{—}198830, NM_{—}032999, NM_{—}015935, NM_{—}134447, NM_{—}006928, NM_{—}014390, NM_{—}020117, NM_{—}001619, NM_{—}022820, NM_{—}005526, NM_{—}033500, NM_{—}001903, NM_{—}004844, NM_{—}006372, NM_{—}022743, NM_{—}007355, NM_{—}012426, NM_{—}000088, NM_{—}182926, NM_{—}004563, NM_{—}014612, NM_{—}004446, XM_{—}168585, NM_{—}014173, NM_{—}144596, NM_{—}138925, NM_{—}174889, NM_{—}006452, NM_{—}004689, NM_{—}015315, XM_{—}379904, NM_{—}014753, NM_{—}198309, NM_{—}002810, NM_{—}002388, NM_{—}014938, NM_{—}018031, NM_{—}023007, NM_{—}002362, NM_{—}006088, NM_{—}002014, NM_{—}003823, NM_{—}030877, NM_{—}003752, NM_{—}001456, NM_{—}006286, NM_{—}145685, NM_{—}003103, NM_{—}002265, NM_{—}005915, XM_{—}376630, NM_{—}006295, NM_{—}145810, NM_{—}015456 and combinations thereof, among others. In a particular embodiment, the hypermutated cancer gene product is not NM_{—}000546 or NM_{—}000314. In another embodiment, the amount of the cancer gene product or activity present in the cancer cells is greater than the amount of the cancer gene product or activity present in the control cell (e.g., normal tissue cells), and an effective amount of at least one compound for inhibiting expression of the at least one altered cancer gene product is administered to the subject. Suitable compounds for inhibiting expression of the at least one hypermutated cancer gene product include, but are not limited to, compounds that inhibit the activity of NM_{—}001273, NM_{—}080921, NM_{—}014865, NM_{—}003072, NM_{—}004104, NM_{—}004990, NM_{—}004599, NM_{—}013417, NM_{—}172230, NM_{—}148842, NM_{—}021948, NM_{—}014014, NM_{—}001417, NM_{—}002271, NM_{—}005030, NM_{—}182917, NM_{—}001923, NM_{—}005762, NM_{—}005348, NM_{—}001418, NM_{—}002266, NM_{—}012218, NM_{—}002466, NM_{—}005557, NM_{—}000691, NM_{—}001569, NM_{—}001090, NM_{—}201524, NM_{—}002291, NM_{—}002230, NM_{—}001605, NM_{—}017647, NM_{—}002541, NM_{—}005438, NM_{—}133645, XM_{—}290401, NM_{—}000968, NM_{—}144733, NM_{—}004741, NM_{—}020414, NM_{—}004793, NM_{—}000224, NM_{—}006819, XM_{—}379877, NM_{—}001436, NM_{—}004247, NM_{—}000967, NM_{—}199413, NM_{—}032044, NM_{—}013403, NM_{—}012469, NM_{—}003169, NM_{—}006470, NM_{—}021991, XM_{—}290506, NM_{—}153280, NM_{—}080686, NM_{—}000289, NM_{—}003875, NM_{—}024658, NM_{—}003074, NM_{—}152298, NM_{—}007126, NM_{—}139215, NM_{—}147200, XM_{—}290345, XM_{—}377464, NM_{—}021873, NM_{—}006429, NM_{—}015292, NM_{—}005956, NM_{—}001940, NM_{—}000526, NM_{—}001747, NM_{—}024311, NM_{—}003938, NM_{—}005336, NM_{—}003751, NM_{—}006839, NM_{—}000937, NM_{—}012112, NM_{—}006739, NM_{—}005916, NM_{—}138421, NM_{—}001379, NM_{—}006289, NM_{—}004939, NM_{—}001357, NM_{—}000422, NM_{—}002417, NM_{—}005968, NM_{—}003754, XM_{—}378197, NM_{—}002473, NM_{—}002972, NM_{—}000546, NM_{—}001102, XM_{—}374522, NM_{—}001458, NM_{—}172020, XM_{—}039701, NM_{—}000701, NM_{—}002298, NM_{—}015179, NM_{—}002967, NM_{—}018454, NM_{—}006796, NM_{—}005558, NM_{—}006812, NM_{—}003400, NM_{—}001034, NM_{—}004728, NM_{—}178313, NM_{—}145714, XM_{—}085722, NM_{—}001798, NM_{—}181054, NM_{—}001916, NM_{—}002668, NM_{—}052963, NM_{—}031243, NM_{—}002638, NM_{—}003146, NM_{—}005564, NM_{—}016292, XM_{—}375253, NM_{—}003815, NM_{—}001363, NM_{—}032271, NM_{—}000314, NM_{—}198830, NM_{—}032999, NM_{—}015935, NM_{—}134447, NM_{—}006928, NM_{—}014390, NM_{—}020117, NM_{—}001619, NM_{—}022820, NM_{—}005526, NM_{—}033500, NM_{—}001903, NM_{—}004844, NM_{—}006372, NM_{—}022743, NM_{—}007355, NM_{—}012426, NM_{—}000088, NM_{—}182926, NM_{—}004563, NM_{—}014612, NM_{—}004446, XM_{—}168585, NM_{—}014173, NM_{—}144596, NM_{—}138925, NM_{—}174889, NM_{—}006452, NM_{—}004689, NM_{—}015315, XM_{—}379904, NM_{—}014753, NM_{—}198309, NM_{—}002810, NM_{—}002388, NM_{—}014938, NM_{—}018031, NM_{—}023007, NM_{—}002362, NM_{—}006088, NM_{—}002014, NM_{—}003823, NM_{—}030877, NM_{—}003752, NM_{—}001456, NM_{—}006286, NM_{—}145685, NM_{—}003103, NM_{—}002265, NM_{—}005915, XM_{—}376630, NM_{—}006295, NM_{—}145810, NM_{—}015456 and combinations thereof.

[0019] The invention further provides pharmaceutical compositions for treating cancers (e.g., liver cancer, prostate cancer, stomach cancer, pancreatic cancer, lung cancer, breast cancer, colon cancer, lymphoma, leukemia). In one embodiment, the pharmaceutical compositions comprise at least one isolated cancer gene product and a pharmaceutically-acceptable carrier. In a particular embodiment, the at least one cancer gene product corresponds to a cancer gene product that has a nucleotide sequence or gene structure in cancer cells relative to control cells. In certain embodiments the isolated cancer gene product is selected from the group consisting of NM_{—}001273, NM_{—}080921, NM_{—}014865, NM_{—}003072, NM_{—}004104, NM_{—}004990, NM_{—}004599, NM_{—}013417, NM_{—}172230, NM_{—}148842, NM_{—}021948, NM_{—}014014, NM_{—}001417, NM_{—}002271, NM_{—}005030, NM_{—}182917, NM_{—}001923, NM_{—}005762, NM_{—}005348, NM_{—}001418, NM_{—}002266, NM_{—}012218, NM_{—}002466, NM_{—}005557, NM_{—}000691, NM_{—}001569, NM_{—}001090, NM_{—}201524, NM_{—}002291, NM_{—}002230, NM_{—}001605, NM_{—}017647, NM_{—}002541, NM_{—}005438, NM_{—}133645, XM_{—}290401, NM_{—}000968, NM_{—}144733, NM_{—}004741, NM_{—}020414, NM_{—}004793, NM_{—}000224, NM_{—}006819, XM_{—}379877, NM_{—}001436, NM_{—}004247, NM_{—}000967, NM_{—}199413, NM_{—}032044, NM_{—}013403, NM_{—}012469, NM_{—}003169, NM_{—}006470, NM_{—}021991, XM_{—}290506, NM_{—}153280, NM_{—}080686, NM_{—}000289, NM_{—}003875, NM_{—}024658, NM_{—}003074, NM_{—}152298, NM_{—}007126, NM_{—}139215, NM_{—}147200, XM_{—}290345, XM_{—}377464, NM_{—}021873, NM_{—}006429, NM_{—}015292, NM_{—}005956, NM_{—}001940, NM_{—}000526, NM_{—}001747, NM_{—}024311, NM_{—}003938, NM_{—}005336, NM_{—}003751, NM_{—}006839, NM_{—}000937, NM_{—}012112, NM_{—}006739, NM_{—}005916, NM_{—}138421, NM_{—}001379, NM_{—}006289, NM_{—}004939, NM_{—}001357, NM_{—}000422, NM_{—}002417, NM_{—}005968, NM_{—}003754, XM_{—}378197, NM_{—}002473, NM_{—}002972, NM_{—}000546, NM_{—}001102, XM_{—}374522, NM_{—}001458, NM_{—}172020, XM_{—}039701, NM_{—}000701, NM_{—}002298, NM_{—}015179, NM_{—}002967, NM_{—}018454, NM_{—}006796, NM_{—}005558, NM_{—}006812, NM_{—}003400, NM_{—}001034, NM_{—}004728, NM_{—}178313, NM_{—}145714, XM_{—}085722, NM_{—}001798, NM_{—}181054, NM_{—}001916, NM_{—}002668, NM_{—}052963, NM_{—}031243, NM_{—}002638, NM_{—}003146, NM_{—}005564, NM_{—}016292, XM_{—}375253, NM_{—}003815, NM_{—}001363, NM_{—}032271, NM_{—}000314, NM_{—}198830, NM_{—}032999, NM_{—}015935, NM_{—}134447, NM_{—}006928, NM_{—}014390, NM_{—}020117, NM_{—}001619, NM_{—}022820, NM_{—}005526, NM_{—}033500, NM_{—}001903, NM_{—}004844, NM_{—}006372, NM_{—}022743, NM_{—}007355, NM_{—}012426, NM_{—}000088, NM_{—}182926, NM_{—}004563, NM_{—}014612, NM_{—}004446, XM_{—}168585, NM_{—}014173, NM_{—}144596, NM_{—}138925, NM_{—}174889, NM_{—}006452, NM_{—}004689, NM_{—}015315, XM_{—}379904, NM_{—}014753, NM_{—}198309, NM_{—}002810, NM_{—}002388, NM_{—}014938, NM_{—}018031, NM_{—}023007, NM_{—}002362, NM_{—}006088, NM_{—}002014, NM_{—}003823, NM_{—}030877, NM_{—}003752, NM_{—}001456, NM_{—}006286, NM_{—}145685, NM_{—}003103, NM_{—}002265, NM_{—}005915, XM_{—}376630, NM_{—}006295, NM_{—}145810, NM_{—}015456 and combinations thereof.

[0020] In another embodiment, the pharmaceutical compositions of the invention comprise at least one cancer gene expression or activity-inhibition compound. In a particular embodiment, the at least one cancer gene expression or activity-inhibition compound is specific for a cancer gene product whose expression or activity is greater in cancer cells than in control cells. In certain embodiments, the cancer gene expression or activity-inhibition compound is specific for one or more cancer gene products selected from the group consisting of NM_{—}001273, NM_{—}080921, NM_{—}014865, NM_{—}003072, NM_{—}004104, NM_{—}004990, NM_{—}004599, NM_{—}013417, NM_{—}172230, NM_{—}148842, NM_{—}021948, NM_{—}014014, NM_{—}001417, NM_{—}002271, NM_{—}005030, NM_{—}182917, NM_{—}001923, NM_{—}005762, NM_{—}005348, NM_{—}001418, NM_{—}002266, NM_{—}012218, NM_{—}002466, NM_{—}005557, NM_{—}000691, NM_{—}001569, NM_{—}001090, NM_{—}201524, NM_{—}002291, NM_{—}002230, NM_{—}001605, NM_{—}017647, NM_{—}002541, NM_{—}005438, NM_{—}133645, XM_{—}290401, NM_{—}000968, NM_{—}144733, NM_{—}004741, NM_{—}020414, NM_{—}004793, NM_{—}000224, NM_{—}006819, XM_{—}379877, NM_{—}001436, NM_{—}004247, NM_{—}000967, NM_{—}199413, NM_{—}032044, NM_{—}013403, NM_{—}012469, NM_{—}003169, NM_{—}006470, NM_{—}021991, XM_{—}290506, NM_{—}153280, NM_{—}080686, NM_{—}000289, NM_{—}003875, NM_{—}024658, NM_{—}003074, NM_{—}152298, NM_{—}007126, NM_{—}139215, NM_{—}147200, XM_{—}290345, XM_{—}377464, NM_{—}021873, NM_{—}006429, NM_{—}015292, NM_{—}005956, NM_{—}001940, NM_{—}000526, NM_{—}001747, NM_{—}024311, NM_{—}003938, NM_{—}005336, NM_{—}003751, NM_{—}006839, NM_{—}000937, NM_{—}012112, NM_{—}006739, NM_{—}005916, NM_{—}138421, NM_{—}001379, NM_{—}006289, NM_{—}004939, NM_{—}001357, NM_{—}000422, NM_{—}002417, NM_{—}005968, NM_{—}003754, XM_{—}378197, NM_{—}002473, NM_{—}002972, NM_{—}000546, NM_{—}001102, XM_{—}374522, NM_{—}001458, NM_{—}172020, XM_{—}039701, NM_{—}000701, NM_{—}002298, NM_{—}015179, NM_{—}002967, NM_{—}018454, NM_{—}006796, NM_{—}005558, NM_{—}006812, NM_{—}003400, NM_{—}001034, NM_{—}004728, NM_{—}178313, NM_{—}145714, XM_{—}085722, NM_{—}001798, NM_{—}181054, NM_{—}001916, NM_{—}002668, NM_{—}052963, NM_{—}031243, NM_{—}002638, NM_{—}003146, NM_{—}005564, NM_{—}016292, XM_{—}375253, NM_{—}003815, NM_{—}001363, NM_{—}032271, NM_{—}000314, NM_{—}198830, NM_{—}032999, NM_{—}015935, NM_{—}134447, NM_{—}006928, NM_{—}014390, NM_{—}020117, NM_{—}001619, NM_{—}022820, NM_{—}005526, NM_{—}033500, NM_{—}001903, NM_{—}004844, NM_{—}006372, NM_{—}022743, NM_{—}007355, NM_{—}012426, NM_{—}000088, NM_{—}182926, NM_{—}004563, NM_{—}014612, NM_{—}004446, XM_{—}168585, NM_{—}014173, NM_{—}144596, NM_{—}138925, NM_{—}174889, NM_{—}006452, NM_{—}004689, NM_{—}015315, XM_{—}379904, NM_{—}014753, NM_{—}198309, NM_{—}002810, NM_{—}002388, NM_{—}014938, NM_{—}018031, NM_{—}023007, NM_{—}002362, NM_{—}006088, NM_{—}002014, NM_{—}003823, NM_{—}030877, NM_{—}003752, NM_{—}001456, NM_{—}006286, NM_{—}145685, NM_{—}003103, NM_{—}002265, NM_{—}005915, XM_{—}376630, NM_{—}006295, NM_{—}145810, NM_{—}015456 and combinations thereof.

[0021] The invention also encompasses methods of identifying an inhibitor of tumorigenesis, comprising providing a test agent to a cell and measuring the level or activity of at least one cancer gene product in the cell. In one embodiment, the method comprises providing a test agent to a cell and measuring the level of at least one cancer gene product associated with altered gene structure in cancers (e.g., liver cancer, prostate cancer, stomach cancer, pancreatic cancer, lung cancer, breast cancer, colon cancer, sarcomas, lymphomas, leukemias). An increase in the level of the cancer gene product or activity in the cell, relative to a suitable control cell, is indicative of the test agent being an inhibitor of tumorigenesis. In a particular embodiment, the at least one cancer gene product associated with altered gene structure in cancer cells is selected from the group consisting of NM_{—}001273, NM_{—}080921, NM_{—}014865, NM_{—}003072, NM_{—}004104, NM_{—}004990, NM_{—}004599, NM_{—}013417, NM_{—}172230, NM_{—}148842, NM_{—}021948, NM_{—}014014, NM_{—}001417, NM_{—}002271, NM_{—}005030, NM_{—}182917, NM_{—}001923, NM_{—}005762, NM_{—}005348, NM_{—}001418, NM_{—}002266, NM_{—}012218, NM_{—}002466, NM_{—}005557, NM_{—}000691, NM_{—}001569, NM_{—}001090, NM_{—}201524, NM_{—}002291, NM_{—}002230, NM_{—}001605, NM_{—}017647, NM_{—}002541, NM_{—}005438, NM_{—}133645, XM_{—}290401, NM_{—}000968, NM_{—}144733, NM_{—}004741, NM_{—}020414, NM_{—}004793, NM_{—}000224, NM_{—}006819, XM_{—}379877, NM_{—}001436, NM_{—}004247, NM_{—}000967, NM_{—}199413, NM_{—}032044, NM_{—}013403, NM_{—}012469, NM_{—}003169, NM_{—}006470, NM_{—}021991, XM_{—}290506, NM_{—}153280, NM_{—}080686, NM_{—}000289, NM_{—}003875, NM_{—}024658, NM_{—}003074, NM_{—}152298, NM_{—}007126, NM_{—}139215, NM_{—}147200, XM_{—}290345, XM_{—}377464, NM_{—}021873, NM_{—}006429, NM_{—}015292, NM_{—}005956, NM_{—}001940, NM_{—}000526, NM_{—}001747, NM_{—}024311, NM_{—}003938, NM_{—}005336, NM_{—}003751, NM_{—}006839, NM_{—}000937, NM_{—}012112, NM_{—}006739, NM_{—}005916, NM_{—}138421, NM_{—}001379, NM_{—}006289, NM_{—}004939, NM_{—}001357, NM_{—}000422, NM_{—}002417, NM_{—}005968, NM_{—}003754, XM_{—}378197, NM_{—}002473, NM_{—}002972, NM_{—}000546, NM_{—}001102, XM_{—}374522, NM_{—}001458, NM_{—}172020, XM_{—}039701, NM_{—}000701, NM_{—}002298, NM_{—}015179, NM_{—}002967, NM_{—}018454, NM_{—}006796, NM_{—}005558, NM_{—}006812, NM_{—}003400, NM_{—}001034, NM_{—}004728, NM_{—}178313, NM_{—}145714, XM_{—}085722, NM_{—}001798, NM_{—}181054, NM_{—}001916, NM_{—}002668, NM_{—}052963, NM_{—}031243, NM_{—}002638, NM_{—}003146, NM_{—}005564, NM_{—}016292, XM_{—}375253, NM_{—}003815, NM_{—}001363, NM_{—}032271, NM_{—}000314, NM_{—}198830, NM_{—}032999, NM_{—}015935, NM_{—}134447, NM_{—}006928, NM_{—}014390, NM_{—}020117, NM_{—}001619, NM_{—}022820, NM_{—}005526, NM_{—}033500, NM_{—}001903, NM_{—}004844, NM_{—}006372, NM_{—}022743, NM_{—}007355, NM_{—}012426, NM_{—}000088, NM_{—}182926, NM_{—}004563, NM_{—}014612, NM_{—}004446, XM_{—}168585, NM_{—}014173, NM_{—}144596, NM_{—}138925, NM_{—}174889, NM_{—}006452, NM_{—}004689, NM_{—}015315, XM_{—}379904, NM_{—}014753, NM_{—}198309, NM_{—}002810, NM_{—}002388, NM_{—}014938, NM_{—}018031, NM_{—}023007, NM_{—}002362, NM_{—}006088, NM_{—}002014, NM_{—}003823, NM_{—}030877, NM_{—}003752, NM_{—}001456, NM_{—}006286, NM_{—}145685, NM_{—}003103, NM_{—}002265, NM_{—}005915, XM_{—}376630, NM_{—}006295, NM_{—}145810, NM_{—}015456 and combinations thereof.

[0022] In other embodiments, the method comprises providing a test agent to a cell and measuring the level of at least one cancer gene product associated with altered gene structure or activity levels in cancers. A decrease in the level of the cancer gene product or activity in the cell, relative to a suitable control cell, is indicative of the test agent being an inhibitor of tumorigenesis. In a particular embodiment, the at least one cancer gene product associated with altered gene structure in cancer cells is selected from the group consisting of NM_{—}001273, NM_{—}080921, NM_{—}014865, NM_{—}003072, NM_{—}004104, NM_{—}004990, NM_{—}004599, NM_{—}013417, NM_{—}172230, NM_{—}148842, NM_{—}021948, NM_{—}014014, NM_{—}001417, NM_{—}002271, NM_{—}005030, NM_{—}182917, NM_{—}001923, NM_{—}005762, NM_{—}005348, NM_{—}001418, NM_{—}002266, NM_{—}012218, NM_{—}002466, NM_{—}005557, NM_{—}000691, NM_{—}001569, NM_{—}001090, NM_{—}201524, NM_{—}002291, NM_{—}002230, NM_{—}001605, NM_{—}017647, NM_{—}002541, NM_{—}005438, NM_{—}133645, XM_{—}290401, NM_{—}000968, NM_{—}144733, NM_{—}004741, NM_{—}020414, NM_{—}004793, NM_{—}000224, NM_{—}006819, XM_{—}379877, NM_{—}001436, NM_{—}004247, NM_{—}000967, NM_{—}199413, NM_{—}032044, NM_{—}013403, NM_{—}012469, NM_{—}003169, NM_{—}006470, NM_{—}021991, XM_{—}290506, NM_{—}153280, NM_{—}080686, NM_{—}000289, NM_{—}003875, NM_{—}024658, NM_{—}003074, NM_{—}152298, NM_{—}007126, NM_{—}139215, NM_{—}147200, XM_{—}290345, XM_{—}377464, NM_{—}021873, NM_{—}006429, NM_{—}015292, NM_{—}005956, NM_{—}001940, NM_{—}000526, NM_{—}001747, NM_{—}024311, NM_{—}003938, NM_{—}005336, NM_{—}003751, NM_{—}006839, NM_{—}000937, NM_{—}012112, NM_{—}006739, NM_{—}005916, NM_{—}138421, NM_{—}001379, NM_{—}006289, NM_{—}004939, NM_{—}001357, NM_{—}000422, NM_{—}002417, NM_{—}005968, NM_{—}003754, XM_{—}378197, NM_{—}002473, NM_{—}002972, NM_{—}000546, NM_{—}001102, XM_{—}374522, NM_{—}001458, NM_{—}172020, XM_{—}039701, NM_{—}000701, NM_{—}002298, NM_{—}015179, NM_{—}002967, NM_{—}018454, NM_{—}006796, NM_{—}005558, NM_{—}006812, NM_{—}003400, NM_{—}001034, NM_{—}004728, NM_{—}178313, NM_{—}145714, XM_{—}085722, NM_{—}001798, NM_{—}181054, NM_{—}001916, NM_{—}002668, NM_{—}052963, NM_{—}031243, NM_{—}002638, NM_{—}003146, NM_{—}005564, NM_{—}016292, XM_{—}375253, NM_{—}003815, NM_{—}001363, NM_{—}032271, NM_{—}000314, NM_{—}198830, NM_{—}032999, NM_{—}015935, NM_{—}134447, NM_{—}006928, NM_{—}014390, NM_{—}020117, NM_{—}001619, NM_{—}022820, NM_{—}005526, NM_{—}033500, NM_{—}001903, NM_{—}004844, NM_{—}006372, NM_{—}022743, NM_{—}007355, NM_{—}012426, NM_{—}000088, NM_{—}182926, NM_{—}004563, NM_{—}014612, NM_{—}004446, XM_{—}168585, NM_{—}014173, NM_{—}144596, NM_{—}138925, NM_{—}174889, NM_{—}006452, NM_{—}004689, NM_{—}015315, XM_{—}379904, NM_{—}014753, NM_{—}198309, NM_{—}002810, NM_{—}002388, NM_{—}014938, NM_{—}018031, NM_{—}023007, NM_{—}002362, NM_{—}006088, NM_{—}002014, NM_{—}003823, NM_{—}030877, NM_{—}003752, NM_{—}001456, NM_{—}006286, NM_{—}145685, NM_{—}003103, NM_{—}002265, NM_{—}005915, XM_{—}376630, NM_{—}006295, NM_{—}145810, NM_{—}015456 and combinations thereof.

### BRIEF DESCRIPTION OF THE DRAWINGS

[0023] FIG. 1 depicts a flow diagram shows the overall procedure for discovery of the mutated human genes in cancer.

[0024] FIG. 2 depicts the in silico mutation profile of TP53 point mutation analysis in human cancer ESTs.

[0025] FIG. 3 depicts the in silico CGH-like profile of TP53 for detection of deletion and amplification in human cancer ESTs.

### DETAILED DESCRIPTION OF THE INVENTION

[0026] The present invention is based, in part, on the identification of particular genes whose structure is altered in cancer cells associated with a variety of different cancers, such as colon, stomach, lung, breast and prostate cancer, lymphomas and leukemias relative to normal control cells.

TABLE 1
Human hypermutated cancer genes.

| | | |
|---|---|---|
| GENBANK | | SEQ ID |
| ID | Hypermutated cancer gene description | NO |

| | | |
|---|---|---|
| NM_001273 | Homo sapiens chromodomain helicase DNA binding protein 4 (CHD4), mRNA. | 1 |
| NM_080921 | Homo sapiens protein tyrosine phosphatase, receptor type, C (PTPRC), transcript | 2 |
| | variant 2, mRNA. | |
| NM_014865 | Homo sapiens chromosome condensation-related SMC-associated protein 1 (CNAP1), | 3 |
| | mRNA. | |
| NM_003072 | Homo sapiens SWI/SNF related, matrix associated, actin dependent regulator of | 4 |
| | chromatin, subfamily a, member 4 (SMARCA4), mRNA. | |
| NM_004104 | Homo sapiens fatty acid synthase (FASN), mRNA. | 5 |
| NM_004990 | Homo sapiens methionine-tRNA synthetase (MARS), mRNA. | 6 |
| NM_004599 | Homo sapiens sterol regulatory element binding transcription factor 2 (SREBF2), | 7 |
| | mRNA. | |
| NM_013417 | Homo sapiens isoleucine-tRNA synthetase (IARS), transcript variant long, mRNA. | 8 |
| NM_172230 | Homo sapiens HRD1 protein (HRD1), transcript variant 2, mRNA. | 9 |
| NM_148842 | Homo sapiens Williams-Beuren syndrome chromosome region 16 (WBSCR16), transcript | 10 |
| | variant 2, mRNA. | |
| NM_021948 | Homo sapiens chondroitin sulfate proteoglycan BEHAB (BCAN), transcript variant 1, | 11 |
| | mRNA. | |
| NM_014014 | Homo sapiens activating signal cointegrator 1 complex subunit 3-like 1 (ASCC3L1), | 12 |
| | mRNA | |
| NM_001417 | Homo sapiens eukaryotic translation initiation factor 4B (EIF4B), mRNA. | 13 |
| NM_002271 | Homo sapiens karyopherin (importin) beta 3 (KPNB3), mRNA. | 14 |
| NM_005030 | Homo sapiens polo-like kinase 1 (Drosophila) (PLK1), mRNA. | 15 |
| NM_182917 | Homo sapiens eukaryotic translation initiation factor 4 gamma, 1 (EIF4G1), transcript | 16 |
| | variant 1, mRNA. | |
| NM_001923 | Homo sapiens damage-specific DNA binding protein 1, 127 kDa (DDB1), mRNA. | 17 |
| NM_005762 | Homo sapiens tripartite motif-containing 28 (TRIM28), mRNA. | 18 |
| NM_005348 | Homo sapiens heat shock 90 kDa protein 1, alpha (HSPCA), mRNA. | 19 |
| NM_001418 | Homo sapiens eukaryotic translation initiation factor 4 gamma, 2 (EIF4G2), mRNA. | 20 |
| NM_002266 | Homo sapiens karyopherin alpha 2 (RAG cohort 1, importin alpha 1) (KPNA2), mRNA. | 21 |
| NM_012218 | Homo sapiens interleukin enhancer binding factor 3, 90 kDa (ILF3), transcript variant | 22 |
| | 1, mRNA. | |
| NM_002466 | Homo sapiens v-myb myeloblastosis viral oncogene homolog (avian)-like 2 (MYBL2), mRNA. | 23 |
| NM_005557 | Homo sapiens keratin 16 (focal non-epidermolytic palmoplantar keratoderma) (KRT16), | 24 |
| | mRNA. | |
| NM_000691 | Homo sapiens aldehyde dehydrogenase 3 family, memberA1 (ALDH3A1), mRNA. | 25 |
| NM_001569 | Homo sapiens interleukin-1 receptor-associated kinase 1 (IRAK1), mRNA. | 26 |
| NM_001090 | Homo sapiens ATP-binding cassette, sub-family F (GCN20), member 1 (ABCF1), mRNA. | 27 |
| NM_201524 | Homo sapiens G protein-coupled receptor 56 (GPR56), transcript variant 2, mRNA. | 28 |
| NM_002291 | Homo sapiens laminin, beta 1 (LAMB1), mRNA. | 29 |
| NM_002230 | Homo sapiens junction plakoglobin (JUP), transcript variant 1, mRNA. | 30 |
| NM_001605 | Homo sapiens alanyl-tRNA synthetase (AARS), mRNA. | 31 |
| NM_017647 | Homo sapiens FtsJ homolog 3 (E. coli) (FTSJ3), mRNA. | 32 |
| NM_002541 | Homo sapiens oxoglutarate (alpha-ketoglutarate) dehydrogenase (lipoamide) (OGDH), | 33 |
| | mRNA. | |
| NM_005438 | Homo sapiens FOS-like antigen 1 (FOSL1), mRNA. | 34 |
| NM_133645 | Homo sapiens mitochondrial translation optimization 1 homolog (S. cerevisiae) | 35 |
| | (MTO1), mRNA. | |
| XM_290401 | Homo sapiens hypothetical protein L0C340318 (L0C340318), mRNA. | 36 |
| NM_000968 | Homo sapiens ribosomal protein L4 (RPL4), mRNA. | 37 |
| NM_144733 | Homo sapiens E1B-55 kDa-associated protein 5 (E1B-AP5), transcript variant 2, mRNA. | 38 |
| NM_004741 | Homo sapiens nucleolar and coiled-body phosphoprotein 1 (NOLC1), mRNA. | 39 |
| NM_020414 | Homo sapiens DEAD (Asp-Glu-Ala-Asp) box polypeptide 24 (DDX24), mRNA. | 40 |
| NM_004793 | Homo sapiens protease, serine, 15 (PRSS15), nuclear gene encoding mitochondrial | 41 |
| | protein, mRNA. | |
| NM_000224 | Homo sapiens keratin 18 (KRT18), transcript variant 1, mRNA. | 42 |
| NM_006819 | Homo sapiens stress-induced-phosphoprotein 1 (Hsp70/Hsp90-organizing protein) | 43 |
| | (STIP1), mRNA. | |
| XM_379877 | Homo sapiens similar to Nuclear envelope pore membrane protein POM 121 (Pore | 44 |
| | membrane protein of 121 kDa) (P145) (LOC402556), mRNA. | |
| NM_001436 | Homo sapiens fibrillarin (FBL), mRNA. | 45 |
| NM_004247 | Homo sapiens U5 snRNP-specific protein, 116 kD (U5-116 KD), mRNA. | 46 |
| NM_000967 | Homo sapiens ribosomal protein L3 (RPL3), mRNA. | 47 |
| NM_199413 | Homo sapiens protein regulator of cytokinesis 1 (PRC1), transcript variant 2, mRNA. | 48 |
| NM_032044 | Homo sapiens regenerating islet-derived family, member 4 (REG4), mRNA. | 49 |
| NM_013403 | Homo sapiens striatin, calmodulin binding protein 4 (STRN4), mRNA. | 50 |
| NM_012469 | Homo sapiens chromosome 20 open reading frame 14 (C20orf14), mRNA. | 51 |
| NM_003169 | Homo sapiens suppressor of Ty 5 homolog (S. cerevisiae) (SUPT5H), mRNA. | 52 |
| NM_006470 | Homo sapiens tripartite motif-containing 16 (TRIM16), mRNA. | 53 |
| NM_021991 | Homo sapiens junction plakoglobin (JUP), transcript variant 2, mRNA. | 54 |
| XM_290506 | Homo sapiens splicing factor 3b, subunit 2, 145 kDa (SF3B2), mRNA. | 55 |
| NM_153280 | Homo sapiens ubiquitin-activating enzyme E1 (A1S9T and BN75 temperature sensitivity | 56 |
| | complementing) (UBE1), transcript variant 2, mRNA. | |
| NM_080686 | Homo sapiens HLA-B associated transcript 2 (BAT2), transcript variant 1, mRNA. | 57 |
| NM_000289 | Homo sapiens phosphofructokinase, muscle (PFKM), mRNA. | 58 |
| NM_003875 | Homo sapiens guanine monphosphate synthetase (GMPS), mRNA. | 59 |
| NM_024658 | Homo sapiens importin 4 (IPO4), mRNA. | 60 |
| NM_003074 | Homo sapiens SWI/SNF related, matrix associated, actin dependent regulator of | 61 |
| | chromatin, subfamily c, member 1 (SMARCC1), mRNA. | |
| NM_152298 | Homo sapiens nuclear autoantigenic sperm protein (histone-binding) (NASP), transcript | 62 |
| | variant 3, mRNA. | |
| NM_007126 | Homo sapiens valosin-containing protein (VCP), mRNA. | 63 |
| NM_139215 | Homo sapiens TAF15 RNA polymerase II, TATA box binding protein (TBP)-associated | 64 |
| | factor, 68 kDa (TAF15), transcript variant 1, mRNA. | |
| NM_147200 | Homo sapiens chromosome 6 open reading frame 4 (C6orf4), transcript variant 1, mRNA. | 65 |
| XM_290345 | Homo sapiens similar to eukaryotic translation initiation factor 3, subunit 5 epsilon, | 66 |
| | 47 kDa; eukaryotic translation initiation factor 3, subunit 5 (epsilon, 47 kD); | |
| | eIF3-epsilon (LOC339799), mRNA. | |
| XM_377464 | Homo sapiens suppressor of Ty 6 homolog (S. cerevisiae) (SUPT6H), mRNA. | 67 |
| NM_021873 | Homo sapiens cell division cycle 25B (CDC25B), transcript variant 3, mRNA. | 68 |
| NM_006429 | Homo sapiens chaperonin containing TCP1, subunit 7 (eta) (CCT7), mRNA. | 69 |
| NM_015292 | Homo sapiens likely ortholog of mouse membrane bound C2 domain containing protein | 70 |
| | (MBC2), mRNA. | |
| NM_005956 | Homo sapiens methylenetetrahydrofolate dehydrogenase (NADP + dependent), | 71 |
| | methenyltetrahydrofolate cyclohydrolase, formyltetrahydrofolate synthetase (MTHFD1), | |
| | mRNA. | |
| NM_001940 | Homo sapiens dentatorubral-pallidoluysian atrophy (atrophin-1) (DRPLA), mRNA. | 72 |
| NM_000526 | Homo sapiens keratin 14 (epidermolysis bullosa simplex, Dowling-Meara, Koebner) | 73 |
| | (KRT14), mRNA. | |
| NM_001747 | Homo sapiens capping protein (actin filament), gelsolin-like (CAPG), mRNA. | 74 |
| NM_024311 | Homo sapiens hypothetical protein ET (ET), mRNA. | 75 |
| NM_003938 | Homo sapiens adaptor-related protein complex 3, delta 1 subunit (AP3D1), mRNA. | 76 |
| NM_005336 | Homo sapiens high density lipoprotein binding protein (vigilin) (HDLBP), mRNA. | 77 |
| NM_003751 | Homo sapiens eukaryotic translation initiation factor 3, subunit 9 eta, 116 kDa | 78 |
| | (EIF3S9), transcript variant 1, mRNA. | |
| NM_006839 | Homo sapiens inner membrane protein, mitochondrial (mitofilin) (IMMT), mRNA. | 79 |
| NM_000937 | Homo sapiens polymerase (RNA) II (DNA directed) polypeptide A, 220 kDa (POLR2A), | 80 |
| | mRNA. | |
| NM_012112 | Homo sapiens TPX2, microtubule-associated protein homolog (Xenopus laevis) (TPX2), | 81 |
| | mRNA. | |
| NM_006739 | Homo sapiens MCM5 minichromosome maintenance deficient 5, cell division cycle 46 | 82 |
| | (S. cerevisiae) (MCM5), mRNA. | |
| NM_005916 | Homo sapiens MCM7 minichromosome maintenance deficient 7 (S. cerevisiae) (MCM7), | 83 |
| | transcript variant 1, mRNA. | |
| NM_138421 | Homo sapiens hypothetical protein BC012010 (LOC113174), mRNA. | 84 |
| NM_001379 | Homo sapiens DNA (cytosine-5-)-methyltransferase 1 (DNMT1), mRNA. | 85 |
| NM_006289 | Homo sapiens talin 1 (TLN 1), mRNA. | 86 |
| NM_004939 | Homo sapiens DEAD (Asp-Glu-Ala-Asp) box polypeptide 1 (DDX1), mRNA. | 87 |
| NM_001357 | Homo sapiens DEAH (Asp-Glu-Ala-His) box polypeptide 9 (DHX9), transcript variant 1, | 88 |
| | mRNA. | |
| NM_000422 | Homo sapiens keratin 17 (KRT17), mRNA. | 89 |
| NM_002417 | Homo sapiens antigen identified by monoclonal antibody Ki-67 (MKI67), mRNA. | 90 |
| NM_005968 | Homo sapiens heterogeneous nuclear ribonucleoprotein M (HNRPM), transcript variant 1, | 91 |
| | mRNA. | |
| NM_003754 | Homo sapiens eukaryotic translation initiation factor 3, subunit 5 epsilon, 47 kDa | 92 |
| | (EIF3S5), mRNA. | |
| NM_032789 | Formerly XM_378197. Homo sapiens poly (ADP-ribose) polymerase family, | 93 |
| | member 10 (PARP10) | |
| NM_002473 | Homo sapiens myosin, heavy polypeptide 9, non-muscle (MYH9), mRNA. | 94 |
| NM_002972 | Homo sapiens SET binding factor 1 (SBF1), transcript variant 1, mRNA. | 95 |
| NM_000546 | Homo sapiens tumor protein p53 (Li-Fraumeni syndrome) (TP53), mRNA. | 96 |
| NM_001102 | Homo sapiens actinin, alpha 1 (ACTN1), mRNA. | 97 |
| XM_374522 | Homo sapiens similar to Filamin C (Gamma-filamin) (Filamin 2) (Protein FLNc) | 98 |
| | (Actin-binding like protein) (ABP-L) (ABP-280-like protein) (LOC392787), mRNA. | |
| NM_001458 | Homo sapiens filamin C, gamma (actin binding protein 280) (FLNC), mRNA. | 99 |
| NM_172020 | Homo sapiens POM121 membrane glycoprotein (rat) (POM121), mRNA. | 100 |
| NM_012416 | Homo sapiens RAN binding protein 6 (RANBP6), mRNA. Formerly XM_039701. | 101 |
| NM_000701 | Homo sapiens ATPase, Na+/K+ transporting, alpha 1 polypeptide (ATP1A1), mRNA. | 102 |
| NM_002298 | Homo sapiens lymphocyte cytosolic protein 1 (L-plastin) (LCP1), mRNA. | 103 |
| NM_015179 | Homo sapiens KIAA0690 (KIAA0690), mRNA. | 104 |
| NM_002967 | Homo sapiens scaffold attachment factor B (SAFB), mRNA. | 105 |
| NM_018454 | Homo sapiens nucleolar and spindle associated protein 1 (NUSAP1), mRNA. | 106 |
| NM_006796 | Homo sapiens AFG3 ATPase family gene 3-like 2 (yeast) (AFG3L2), nuclear gene encoding | 107 |
| | mitochondrial protein, mRNA. | |
| NM_005558 | Homo sapiens ladinin 1 (LAD1), mRNA. | 108 |
| NM_006812 | Homo sapiens amplified in osteosarcoma (OS-9), mRNA. | 109 |
| NM_003400 | Homo sapiens exportin 1 (CRM1 homolog, yeast) (XPO1), mRNA. | 110 |
| NM_001034 | Homo sapiens ribonucleotide reductase M2 polypeptide (RRM2), mRNA. | 111 |
| NM_004728 | Homo sapiens DEAD (Asp-Glu-Ala-Asp) box polypeptide 21 (DDX21), mRNA. | 112 |
| NM_178313 | Homo sapiens spectrin, beta, non-erythrocytic 1 (SPTBN1), transcript variant 2, mRNA. | 113 |
| NM_145714 | Homo sapiens ataxin 2 related protein (A2LP), transcript variant B, mRNA. | 114 |
| XM_085722 | Homo sapiens similar to Tripartite motif protein 16 (Estrogen-responsive B box | 115 |
| | protein) (LOC147166), mRNA. | |
| NM_001798 | Homo sapiens cyclin-dependent kinase 2 (CDK2), transcript variant 1, mRNA. | 116 |
| NM_181054 | Homo sapiens hypoxia-inducible factor 1, alpha subunit (basic helix-loop-helix | 117 |
| | transcription factor) (HIF1A), transcript variant 2, mRNA. | |
| NM_001916 | Homo sapiens cytochrome c-1 (CYC1), mRNA. | 118 |
| NM_002668 | Homo sapiens proteolipid protein 2 (colonic epithelium-enriched) (PLP2), mRNA. | 119 |
| NM_052963 | Homo sapiens mitochondrial topoisomerase I (TOP1MT), nuclear gene encoding | 120 |
| | mitochondrial protein, mRNA. | |
| NM_031243 | Homo sapiens heterogeneous nuclear ribonucleoprotein A2/B1 (HNRPA2B1), transcript | 121 |
| | variant 81, mRNA. | |
| NM_002638 | Homo sapiens protease inhibitor 3, skin-derived (SKALP) (PI3), mRNA. | 122 |
| NM_003146 | Homo sapiens structure specific recognition protein 1 (SSRP1), mRNA. | 123 |
| NM_005564 | Homo sapiens lipocalin 2 (oncogene 24p3) (LCN2), mRNA. | 124 |
| NM_016292 | Homo sapiens heat shock protein 75 (TRAP1), mRNA. | 125 |
| NM_018193 | Homo sapiens KIAA1794 (KIAA1794), mRNA. Formerly XM_375253. | 126 |
| NM_003815 | Homo sapiens a disintegrin and metalloproteinase domain 15 (metargidin) (ADAM15), | 127 |
| | mRNA. | |
| NM_001363 | Homo sapiens dyskeratosis congenita 1, dyskerin (DKC1), mRNA. | 128 |
| NM_032271 | Homo sapiens ring finger and WD repeat domain 1 (RFWD1), mRNA. | 129 |
| NM_000314 | Homo sapiens phosphatase and tensin homolog (mutated in multiple advanced cancers 1) | 130 |
| | (PTEN), mRNA. | |
| NM_198830 | Homo sapiens ATP citrate lyase (ACLY), transcript variant 2, mRNA. | 131 |
| NM_032999 | Homo sapiens general transcription factor II, i (GTF2I), transcript variant 1, mRNA. | 132 |
| NM_015935 | Homo sapiens CGI-01 protein (CGI-01), transcript variant 1, mRNA. | 133 |
| NM_134447 | Homo sapiens chromosome 19 open reading frame 2 (C19orf2), transcript variant 2, mRNA. | 134 |
| NM_006928 | Homo sapiens silver homolog (mouse) (SILV), mRNA. | 135 |
| NM_014390 | Homo sapiens staphylococcal nuclease domain containing 1 (SND1), mRNA. | 136 |
| NM_020117 | Homo sapiens leucyl-tRNA synthetase (LARS), mRNA. | 137 |
| NM_001619 | Homo sapiens adrenergic, beta, receptor kinase 1 (ADRBK1), mRNA. | 138 |
| NM_022820 | Homo sapiens cytochrome P450, family 3, subfamily A, polypeptide 43 (CYP3A43), | 139 |
| | transcript variant 1, mRNA. | |
| NM_005526 | Homo sapiens heat shock transcription factor 1 (HSF1), mRNA. | 140 |
| NM_033500 | Homo sapiens hexokinase 1 (HK1), nuclear gene encoding mitochondrial protein, | 141 |
| | transcript variant 5, mRNA. | |
| NM_001903 | Homo sapiens catenin (cadherin-associated protein), alpha 1, 102 kDa (CTNNA1), mRNA. | 142 |
| NM_004844 | Homo sapiens SH3-domain binding protein 5 (BTK-associated) (SH3BP5), mRNA. | 143 |
| NM_006372 | Homo sapiens synaptotagmin binding, cytoplasmic RNA interacting protein (SYNCRIP), | 144 |
| | mRNA. | |
| NM_022743 | Homo sapiens SET and MYND domain containing 3 (SMYD3), mRNA. | 145 |
| NM_007355 | Homo sapiens heat shock 90 kDa protein 1, beta (HSPCB), mRNA. | 146 |
| NM_012426 | Homo sapiens splicing factor 3b, subunit 3, 130 kDa (SF3B3), mRNA. | 147 |
| NM_000088 | Homo sapiens collagen, type I, alpha 1 (COL1A1), mRNA. | 148 |
| NM_182926 | Homo sapiens kinectin 1 (kinesin receptor) (KTN1), mRNA. | 149 |
| NM_004563 | Homo sapiens phosphoenolpyruvate carboxykinase 2 (mitochondrial) (PCK2), mRNA. | 150 |
| NM_014612 | Homo sapiens chromosome 9 open reading frame 10 (C9orf10), mRNA. | 151 |
| NM_004446 | Homo sapiens glutamyl-prolyl-tRNA synthetase (EPRS), mRNA. | 152 |
| XM_168585 | Homo sapiens similar to mucin 11 (LOC219612), mRNA. | 153 |
| NM_014173 | Homo sapiens HSPC142 protein (HSPC142), mRNA. | 154 |
| NM_144596 | Homo sapiens tetratricopeptide repeat domain 8 (TTC8), transcript variant 3, mRNA. | 155 |
| NM_138925 | Homo sapiens SON DNA binding protein (SON), transcript variant a, mRNA. | 156 |
| NM_174889 | Homo sapiens Myc-induced mitochondria protein (mimitin), mRNA | 157 |
| NM_006452 | Homo sapiens phosphoribosylaminoimidazole carboxylase, phosphoribosylaminoimidazole | 158 |
| | succinocarboxamide synthetase (PAICS), mRNA. | |
| NM_004689 | Homo sapiens metastasis associated 1 (MTA1), mRNA. | 159 |
| NM_015315 | Homo sapiens likely ortholog of mouse Ia related protein (LARP), mRNA. | 160 |
| XM_379904 | Homo sapiens similar to mucin 11 (LOC402575), mRNA. | 161 |
| NM_014753 | Homo sapiens BMS1-Iike, ribosome assembly protein (yeast) (BMS1L), mRNA. | 162 |
| NM_198309 | Homo sapiens tetratricopeptide repeat domain 8 (TTC8), transcript variant 1, mRNA. | 163 |
| NM_002810 | Homo sapiens proteasome (prosome, macropain) 26S subunit, non-ATPase, 4 (PSMD4), | 164 |
| | transcript variant 1, mRNA. | |
| NM_002388 | Homo sapiens MCM3 minichromosome maintenance deficient 3 (S. cerevisiae) (MCM3), | 165 |
| | mRNA. | |
| NM_014938 | Homo sapiens Mix interactor (MONDOA), mRNA. | 166 |
| NM_018031 | Homo sapiens WD repeat domain 6 (WDR6), mRNA. | 167 |
| NM_023007 | Homo sapiens jumonji domain containing 4 (JMJD4), mRNA | 168 |
| NM_002362 | Homo sapiens melanoma antigen, family A, 4 (MAGEA4), mRNA. | 169 |
| NM_006088 | Homo sapiens tubulin, beta, 2 (TUBB2), mRNA. | 170 |
| NM_002014 | Homo sapiens FK506 binding protein 4, 59 kDa (FKBP4), mRNA. | 171 |
| NM_003823 | Homo sapiens tumor necrosis factor receptor superfamily, member 6b, decoy (TNFRSF6B), | 172 |
| | transcript variant M68E, mRNA. | |
| NM_030877 | Homo sapiens catenin, beta like 1 (CTNNBL1), mRNA. | 173 |
| NM_003752 | Homo sapiens eukaryotic translation initiation factor 3, subunit 8, 110 kDa (EIF3S8), | 174 |
| | mRNA. | |
| NM_001456 | Homo sapiens filamin A, alpha (actin binding protein 280) (FLNA), mRNA. | 175 |
| NM_006286 | Homo sapiens transcription factor Dp-2 (E2F dimerization partner 2) (TFDP2), mRNA. | 176 |
| NM_145685 | Homo sapiens BRF1 homolog, subunit of RNA polymerase III transcription initiation | 177 |
| | factor IIIB (S. cerevisiae) (BRF1), transcript variant 3, mRNA. | |
| NM_003103 | Homo sapiens SON DNA binding protein (SON), transcript variant g, mRNA. | 178 |
| NM_002265 | Homo sapiens karyopherin (importin) beta 1 (KPNB1), mRNA. | 179 |
| NM_005915 | Homo sapiens MCM6 minichromosome maintenance deficient 6 (MIS5 homolog, S. pombe) | 180 |
| | (S. cerevisiae) (MCM6), mRNA. | |
| NM_006295 | Homo sapiens valyl-tRNA synthetase 2 (VARS2), mRNA. | 181 |
| NM_145810 | Homo sapiens cell division cycle associated 7 (CDCA7), transcript variant 2, mRNA. | 182 |
| NM_015456 | Homo sapiens cofactor of BRCA1 (COBRA1), mRNA. | 183 |

* All sequences are human.

[0027] The present invention encompasses methods of diagnosing whether a subject has, or is at risk for developing, a cancer, comprising determining the nucleotide sequence or the gene structure of one cancer gene in a test sample from the subject and comparing the nucleotide sequence or the gene structure of one cancer gene in a control sample. As used herein, a “subject” can be any mammal that has, or is suspected of having, a cancer. In a preferred embodiment, the subject is a human who has, or is suspected of having, a cancer.

[0028] In one embodiment, the at least one cancer gene assayed in the test sample is selected from the group consisting of NM_{—}001273, NM_{—}080921, NM_{—}014865, NM_{—}003072, NM_{—}004104, NM_{—}004990, NM_{—}004599, NM_{—}013417, NM_{—}172230, NM_{—}148842, NM_{—}021948, NM_{—}014014, NM_{—}001417, NM_{—}002271, NM_{—}005030, NM_{—}182917, NM_{—}001923, NM_{—}005762, NM_{—}005348, NM_{—}001418, NM_{—}002266, NM_{—}012218, NM_{—}002466, NM_{—}005557, NM_{—}000691, NM_{—}001569, NM_{—}001090, NM_{—}201524, NM_{—}002291, NM_{—}002230, NM_{—}001605, NM_{—}017647, NM_{—}002541, NM_{—}005438, NM_{—}133645, XM_{—}290401, NM_{—}000968, NM_{—}144733, NM_{—}004741, NM_{—}020414, NM_{—}004793, NM_{—}000224, NM_{—}006819, XM_{—}379877, NM_{—}001436, NM_{—}004247, NM_{—}000967, NM_{—}199413, NM_{—}032044, NM_{—}013403, NM_{—}012469, NM_{—}003169, NM_{—}006470, NM_{—}021991, XM_{—}290506, NM_{—}153280, NM_{—}080686, NM_{—}000289, NM_{—}003875, NM_{—}024658, NM_{—}003074, NM_{—}152298, NM_{—}007126, NM_{—}139215, NM_{—}147200, XM_{—}290345, XM_{—}377464, NM_{—}021873, NM_{—}006429, NM_{—}015292, NM_{—}005956, NM_{—}001940, NM_{—}000526, NM_{—}001747, NM_{—}024311, NM_{—}003938, NM_{—}005336, NM_{—}003751, NM_{—}006839, NM_{—}000937, NM_{—}012112, NM_{—}006739, NM_{—}005916, NM_{—}138421, NM_{—}001379, NM_{—}006289, NM_{—}004939, NM_{—}001357, NM_{—}000422, NM_{—}002417, NM_{—}005968, NM_{—}003754, XM_{—}378197, NM_{—}002473, NM_{—}002972, NM_{—}000546, NM_{—}001102, XM_{—}374522, NM_{—}001458, NM_{—}172020, XM_{—}039701, NM_{—}000701, NM_{—}002298, NM_{—}015179, NM_{—}002967, NM_{—}018454, NM_{—}006796, NM_{—}005558, NM_{—}006812, NM_{—}003400, NM_{—}001034, NM_{—}004728, NM_{—}178313, NM_{—}145714, XM_{—}085722, NM_{—}001798, NM_{—}181054, NM_{—}001916, NM_{—}002668, NM_{—}052963, NM_{—}031243, NM_{—}002638, NM_{—}003146, NM_{—}005564, NM_{—}016292, XM_{—}375253, NM_{—}003815, NM_{—}001363, NM_{—}032271, NM_{—}000314, NM_{—}198830, NM_{—}032999, NM_{—}015935, NM_{—}134447, NM_{—}006928, NM_{—}014390, NM_{—}020117, NM_{—}001619, NM_{—}022820, NM_{—}005526, NM_{—}033500, NM_{—}001903, NM_{—}004844, NM_{—}006372, NM_{—}022743, NM_{—}007355, NM_{—}012426, NM_{—}000088, NM_{—}182926, NM_{—}004563, NM_{—}014612, NM_{—}004446, XM_{—}168585, NM_{—}014173, NM_{—}144596, NM_{—}138925, NM_{—}174889, NM_{—}006452, NM_{—}004689, NM_{—}015315, XM_{—}379904, NM_{—}014753, NM_{—}198309, NM_{—}002810, NM_{—}002388, NM_{—}014938, NM_{—}018031, NM_{—}023007, NM_{—}002362, NM_{—}006088, NM_{—}002014, NM_{—}003823, NM_{—}030877, NM_{—}003752, NM_{—}001456, NM_{—}006286, NM_{—}145685, NM_{—}003103, NM_{—}002265, NM_{—}005915, XM_{—}376630, NM_{—}006295, NM_{—}145810, NM_{—}015456 and combinations thereof. In a particular embodiment, the cancer gene product is NM_{—}001273, NM_{—}080921, NM_{—}014865, NM_{—}003072, NM_{—}004104, NM_{—}004990, NM_{—}004599, NM_{—}013417, NM_{—}172230, NM_{—}148842, NM_{—}021948, NM_{—}014014 or NM_{—}001417. In another embodiment, the cancer gene product is not NM_{—}000546 or NM_{—}000314. In an additional embodiment, the cancer gene product is not NM_{—}198525 or XM_{—}093644. In an additional embodiment, the cancer gene product is not XM_{—}060328, NM_{—}173358, NM_{—}021014, NM_{—}005635, XM_{—}377964, XM_{—}380028, NM_{—}005636, NM_{—}173357, NM_{—}021015, NM_{—}021923, NM_{—}175698, NM_{—}024841, NM_{—}015055, NM_{—}016249, NM_{—}006771, XM_{—}377527, NM_{—}007109, NM_{—}020994, NM_{—}174961, NM_{—}172347, XM_{—}376672, XM_{—}374650, XM_{—}087062, NM_{—}001809, NM_{—}080746, XM_{—}372773, XM_{—}210557, NM_{—}175711, XM_{—}371019, XM_{—}371151, XM_{—}373345, NM_{—}001532, NM_{—}001941, NM_{—}080626, XM_{—}085138, XM_{—}376327, NM_{—}000298, NM_{—}006941, XM_{—}168583, XM_{—}379905, NM_{—}181871, NM_{—}005504, NM_{—}016932, NM_{—}003147, NM_{—}147199, NM_{—}054031, NM_{—}052969, NM_{—}001002, NM_{—}053275, NM_{—}005110, NM_{—}004153, NM_{—}133373, XM_{—}373373, XM_{—}016713, XM_{—}370872, NM_{—}152341, XM_{—}291704, XM_{—}371781, XM_{—}209178, XM_{—}371758, XM_{—}373089, NM_{—}017515, NM_{—}015061, NM_{—}012427, NM_{—}006546, XM_{—}379625, XM_{—}208043, NM_{—}005225, NM_{—}004140, NM_{—}032756, XM_{—}062300, NM_{—}021830, NM_{—}001252, NM_{—}002478, XM_{—}070233, or NM_{—}000315. In a further embodiment, the hypermutated cancer gene product is not NM_{—}002277, NM_{—}198696, NM_{—}052848, NM_{—}025108, NM_{—}018957, NM_{—}052817, NM_{—}020880, NM_{—}177478, NM_{—}019020, NM_{—}007197, NM_{—}006987, NM_{—}033316, NM_{—}012216, or NM_{—}152426. In another embodiment, the cancer gene product is not NM_{—}002034, NM_{—}018706, NM_{—}025265, XM_{—}045581, XM_{—}379215, XM_{—}372315, XM_{—}065899, NM_{—}005929, NM_{—}021795, NM_{—}004995, XM_{—}377110, NM_{—}020385, XM_{—}373949, XM_{—}377797, XM_{—}372916, XM_{—}372966, NM_{—}002280, XM_{—}377904, NM_{—}005686, NM_{—}033035, NM_{—}005547, XM_{—}292596, XM_{—}370710, NM_{—}024671, XM_{—}370988, NM_{—}006385, XM_{—}060535, NM_{—}031211, NM_{—}199182, XM_{—}378858, NM_{—}139177, XM_{—}371658, NM_{—}003771, NM_{—}018000, NM_{—}198855, XM_{—}085578, NM_{—}006681, NM_{—}018131, NM_{—}014321, NM_{—}005634, NM_{—}032792, NM_{—}001973, NM_{—}003202, NM_{—}024762, NM_{—}002278, NM_{—}005224, or NM_{—}001878. In yet another embodiment, the cancer gene product is not NM_{—}024087, NM_{—}022337, NM_{—}015990, NM_{—}002391, NM_{—}138430, NM_{—}023010, NM_{—}006465, NM_{—}018129, NM_{—}013373, NM_{—}017424, XM_{—}292627, NM_{—}003356, NM_{—}004739, NM_{—}153212, NM_{—}145060, XM_{—}371407, NM_{—}002386, XM_{—}372816, NM_{—}080632, XM_{—}370687, NM_{—}001805, or NM_{—}024888.

[0029] The cancer can be any cancer that arises from organs, solid or soft tissues, blood marrow. Such cancers are typically associated with the formation and/or presence of tumor masses and can be carcinomas, sarcomas, lymphomas or leukemias. Specific examples of cancers to be diagnosed by the methods of the invention include, but are not limited to, colon cancer, rectal cancer, stomach (gastric) cancer, pancreatic cancer, breast cancer, lung cancer, prostate cancer, bronchial cancer, testicular cancer, ovarian cancer, uterine cancer, penile cancer, melanoma and other skin cancers, liver cancer, esophageal cancer, cancers of the oral cavity and pharynx (e.g., tongue cancer, mouth cancer), cancers of the digestive system (e.g., intestinal cancer, gall bladder cancer), bone and joint cancers, cancers of the endocrine system (e.g., thyroid cancer), brain cancer, eye cancer, cancers of the urinary system (e.g., kidney cancer, urinary bladder cancer), Hodgkin disease and non-Hodgkin lymphoma

[0030] The nucleotide sequence or gene structure of at least one cancer gene can be measured in a biological sample (e.g., cells, tissues) obtained from the subject. For example, a tissue sample (e.g., from a tumor) can be removed from a subject suspected of having a cancer by conventional biopsy techniques. In another embodiment, a blood sample can be removed from the subject, and blood cells (e.g., white blood cells) can be isolated for DNA extraction by standard techniques. The blood or tissue sample is preferably obtained from the subject prior to initiation of radiotherapy, chemotherapy or other therapeutic treatment. A corresponding control tissue or blood sample can be obtained from unaffected tissues of the subject, from a normal human individual or population of normal individuals, or from cultured cells corresponding to the majority of cells in the subject's sample. The control tissue or blood sample is then processed along with the sample from the subject, so that the sequence or gene structure of cancer gene product produced from a given cancer gene in cells from the subject's sample can be compared to the corresponding cancer gene product from cells of the control sample.

[0031] An alteration (e.g., a mutation) in the gene structure of a cancer gene product in the sample obtained from the subject, relative to the level of a corresponding cancer gene product in a control sample, is indicative of the presence of a cancer in the subject. In one embodiment, the structure of the at least one cancer gene product in the test sample is mutated corresponding to the cancer gene product in the control sample (i.e., nucleotide sequence of the cancer gene product is “mutated”).

[0032] The nucleotide sequence or genetic structure of a cancer gene product in a sample can be measured using any technique that is suitable for detecting DNA mutations in a biological sample. Suitable techniques (e.g., Southern blotting, DNA sequencing, dHPLC, RT-PCR, CGH, array-CGH, in situ hybridization) for identifying DNA mutations or alterations in a biological sample (e.g., cells, tissues) are well known to those of skill in the art. In a particular embodiment, the nucleotide sequence of at least one cancer gene product is detected using DNA sequencing. For example, total cellular DNA can be purified from cells by homogenization in the presence of nucleic acid extraction buffer, followed by centrifugation. Nucleic acids are precipitated, and DNA is recovered. The cancer gene DNA is isolated by PCR amplification with cancer gene specific primers. Suitable methods for designing and synthesizing cancer gene specific primers are well known to those of skill in the art. See, for example, Molecular Cloning: A Laboratory Manual, J. Sambrook et al., eds., 3rd edition, Cold Spring Harbor Laboratory Press, 1989, the entire disclosure of which is incorporated by reference.

[0033] For example, the genomic DNA can be labeled with, e.g., a radionuclide, such as ³H, ³²P, ³³P, ¹⁴C, or ³⁵S; a heavy metal; or a ligand capable of functioning as a specific binding pair member for a labeled ligand (e.g., biotin, avidin or an antibody), a fluorescent molecule, a chemiluminescent molecule, an enzyme or the like.

[0034] DNA can be labeled to high specific activity by either the nick translation method of Rigby et al. (1977) J. Mol. Biol. 113:237-251 or by the random priming method of Fienberg et al. (1983), Anal. Biochem. 132:6-13, the entire disclosures of which are incorporated herein by reference. The latter is the method of choice for synthesizing ³²P_labeled probes of high specific activity from single-stranded DNA or from RNA templates. For example, by replacing preexisting nucleotides with highly radioactive nucleotides according to the nick translation method, it is possible to prepare ³²P-labeled nucleic acid probes with a specific activity well in excess of 108 cpm/microgram. Autoradiographic detection of hybridization can then be performed by exposing hybridized filters to photographic film. Densitometric scanning of the photographic films exposed by the hybridized filters provides an accurate measurement of array-CGH hybridizations. Using another approach, array-CGH hybridizations can be quantified by computerized imaging systems, such as the Molecular Dynamics 400-B 2D Phosphorimager available from Amersham Biosciences, Piscataway, N.J.

[0035] Where radionuclide labeling of DNA or RNA probes is not practical, the random-primer method can be used to incorporate an analogue, for example, the dTTP analogue 5-(N—(N-biotinyl-epsilon-aminocaproyl)-3-aminoallyl)deoxyuridine triphosphate, into the probe molecule. The biotinylated probe oligonucleotide can be detected by reaction with biotin-binding proteins, such as avidin, streptavidin, and antibodies (e.g., anti-biotin antibodies) coupled to fluorescent dyes or enzymes that produce color reactions.

[0036] In addition to southern blotting, identifying genetic lesions can be accomplished using the technique of in situ hybridization. This technique requires fewer cells than the Southern blotting and array-CGH techniques, and involves depositing whole cells onto a microscope cover slip and probing the nucleic acid content of the cell with a solution containing radioactive or otherwise labeled nucleic acid (e.g., cDNA or RNA) probes. This technique is particularly well-suited for analyzing tissue biopsy samples from subjects. The practice of the in situ hybridization technique is described in more detail in U.S. Pat. No. 5,427,916, the entire disclosure of which is incorporated herein by reference. Suitable probes for in situ hybridization of a given cancer gene product can be produced from the nucleic acid sequences provided in Table 1a and Table 1b, and include, but are not limited to, probes having about 90%, 95%, 98%, or 99% complementarity to a cancer gene product of interest, as described above.

[0037] In some instances, it may be desirable to simultaneously determine the genetic structure or nucleotide sequence of a plurality of different cancer gene products in a sample. In other instances, it may be desirable to determine the genetic structure or nucleotide sequence of all known cancer genes correlated with a cancer. Assessing cancer-specific genomic structures or nucleotide sequences for hundreds of cancer genes or gene products is time consuming and requires a large amount of total DNA or RNA (e.g., at least 20 μg for each Southern blot) and autoradiographic techniques that require radioactive isotopes.

[0038] To overcome these limitations, an oligonucleotide library, in microchip format (i.e., a microarray), may be constructed containing a set of oligonucleotide (e.g., oligodeoxynucleotides) probes that are specific for a set of cancer genes. Using such a microarray in an array-CGH assay, the genomic structure and nucleotide sequence of multiple cancer genes in a biological sample can be determined by laneling the DNA to generate a set of target oligodeoxynucleotides, and hybridizing them to probe the oligonucleotides on the microarray to generate a hybridization, or array-CGH, profile. The hybridization profile of the test sample can be compared to that of a control sample to determine which cancer genes have an altered genomic structure in cancer cells. As used herein, “probe oligonucleotide” or “probe oligodeoxynucleotide” refers to an oligonucleotide that is capable of hybridizing to a target oligonucleotide. “Target oligonucleotide” or “target oligodeoxynucleotide” refers to a molecule to be detected (e.g., via hybridization). By “cancer gene-specific probe oligonucleotide” or “probe oligonucleotide specific for a cancer gene” is meant a probe oligonucleotide that has a sequence selected to hybridize to a specific cancer gene gene product, or to a reverse transcript of the specific cancer gene gene product.

[0039] An “array-CGH profile” or “hybridization profile” of a particular sample is essentially a fingerprint of the state of the sample; while two states may have any particular gene similarly structured, the evaluation of a number of genes simultaneously allows the generation of a gene structure or sequence profile that is unique to the state of the cell. That is, normal tissue may be distinguished from cancerous (e.g. tumor) tissue, and within cancerous tissue, different prognosis states (for example, good or poor long term survival prospects) may be determined. By comparing genomic structure or nucleotide sequence profiles of cancer tissue in different states, information regarding which genes are important (including mutated, deleted or amplified genes) in each of these states is obtained. The identification of sequences that are altered in tumor tissues, resulting in different prognostic outcomes, allows the use of this information in a number of ways. For example, a particular treatment regime may be evaluated (e.g., to determine whether a chemotherapeutic drug acts to improve the long-term prognosis in a particular patient). Similarly, diagnosis may be done or confirmed by comparing patient samples with known genomic structure or nucleotide sequence profiles. Furthermore, these genomic structure or nucleotide sequence profiles (or individual cancer genes) allow screening of drug candidates that convert a tumor poor prognosis profile to a better prognosis profile.

[0040] Accordingly, the invention provides methods of diagnosing whether a subject has, or is at risk for developing, a cancer, comprising labeling DNA or RNA from a test sample obtained from the subject to provide a set of target oligodeoxynucleotides, hybridizing the target oligodeoxynucleotides to a microarray comprising cancer gene-specific probe oligonucleotides to provide a hybridization profile for the test sample, and comparing the test sample hybridization profile to a hybridization profile generated from a control sample, wherein an alteration in the signal of at least one cancer gene is indicative of the subject either having, or being at risk for developing, a cancer. In one embodiment, the microarray comprises cancer gene-specific probe oligonucleotides for a substantial portion of all described human hypermutated cancer genes. In a particular embodiment, the microarray comprises cancer gene-specific probe oligonucleotides for one or more hypermutated cancer genes selected from the group consisting of NM_{—}001273, NM_{—}080921, NM_{—}014865, NM_{—}003072, NM_{—}004104, NM_{—}004990, NM_{—}004599, NM_{—}013417, NM_{—}172230, NM_{—}148842, NM_{—}021948, NM_{—}014014, NM_{—}001417, NM_{—}002271, NM_{—}005030, NM_{—}182917, NM_{—}001923, NM_{—}005762, NM_{—}005348, NM_{—}001418, NM_{—}002266, NM_{—}012218, NM_{—}002466, NM_{—}005557, NM_{—}000691, NM_{—}001569, NM_{—}001090, NM_{—}201524, NM_{—}002291, NM_{—}002230, NM_{—}001605, NM_{—}017647, NM_{—}002541, NM_{—}005438, NM_{—}133645, XM_{—}290401, NM_{—}000968, NM_{—}144733, NM_{—}004741, NM_{—}020414, NM_{—}004793, NM_{—}000224, NM_{—}006819, XM_{—}379877, NM_{—}001436, NM_{—}004247, NM_{—}000967, NM_{—}199413, NM_{—}032044, NM_{—}013403, NM_{—}012469, NM_{—}003169, NM_{—}006470, NM_{—}021991, XM_{—}290506, NM_{—}153280, NM_{—}080686, NM_{—}000289, NM_{—}003875, NM_{—}024658, NM_{—}003074, NM_{—}152298, NM_{—}007126, NM_{—}139215, NM_{—}147200, XM_{—}290345, XM_{—}377464, NM_{—}021873, NM_{—}006429, NM_{—}015292, NM_{—}005956, NM_{—}001940, NM_{—}000526, NM_{—}001747, NM_{—}024311, NM_{—}003938, NM_{—}005336, NM_{—}003751, NM_{—}006839, NM_{—}000937, NM_{—}012112, NM_{—}006739, NM_{—}005916, NM_{—}138421, NM_{—}001379, NM_{—}006289, NM_{—}004939, NM_{—}001357, NM_{—}000422, NM_{—}002417, NM_{—}005968, NM_{—}003754, XM_{—}378197, NM_{—}002473, NM_{—}002972, NM_{—}000546, NM_{—}001102, XM_{—}374522, NM_{—}001458, NM_{—}172020, XM_{—}039701, NM_{—}000701, NM_{—}002298, NM_{—}015179, NM_{—}002967, NM_{—}018454, NM_{—}006796, NM_{—}005558, NM_{—}006812, NM_{—}003400, NM_{—}001034, NM_{—}004728, NM_{—}178313, NM_{—}145714, XM_{—}085722, NM_{—}001798, NM_{—}181054, NM_{—}001916, NM_{—}002668, NM_{—}052963, NM_{—}031243, NM_{—}002638, NM_{—}003146, NM_{—}005564, NM_{—}016292, XM_{—}375253, NM_{—}003815, NM_{—}001363, NM_{—}032271, NM_{—}000314, NM_{—}198830, NM_{—}032999, NM_{—}015935, NM_{—}134447, NM_{—}006928, NM_{—}014390, NM_{—}020117, NM_{—}001619, NM_{—}022820, NM_{—}005526, NM_{—}033500, NM_{—}001903, NM_{—}004844, NM_{—}006372, NM_{—}022743, NM_{—}007355, NM_{—}012426, NM_{—}000088, NM_{—}182926, NM_{—}004563, NM_{—}014612, NM_{—}004446, XM_{—}168585, NM_{—}014173, NM_{—}144596, NM_{—}138925, NM_{—}174889, NM_{—}006452, NM_{—}004689, NM_{—}015315, XM_{—}379904, NM_{—}014753, NM_{—}198309, NM_{—}002810, NM_{—}002388, NM_{—}014938, NM_{—}018031, NM_{—}023007, NM_{—}002362, NM_{—}006088, NM_{—}002014, NM_{—}003823, NM_{—}030877, NM_{—}003752, NM_{—}001456, NM_{—}006286, NM_{—}145685, NM_{—}003103, NM_{—}002265, NM_{—}005915, XM_{—}376630, NM_{—}006295, NM_{—}145810, NM_{—}015456 and combinations thereof.

[0041] The microarray can be prepared from gene-specific oligonucleotide probes generated from hypermutated cancer genes sequences. The array may contain two or more different oligonucleotide probes for each hypermutated cancer genes, designed from different gene regions. The array may also contain for each oligonucleotide probe the 4 different nucleotide variations. This allows hybridization control and determination of the nucleotide sequence. One or more appropriate controls for non-specific hybridization may also be included on the microchip. For this purpose, sequences are selected based upon the absence of any homology with any human DNA or RNA sequence.

[0042] The microarray may be fabricated using techniques known in the art. For example, probe oligonucleotides of an appropriate length, e.g., 60 nucleotides, are 5′-amine modified at position C6 and printed using commercially available microarray systems, e.g., the Biorobotics Arrayer and Amersham CodeLink™ activated slides. Labeled DNA oligomer corresponding to the target DNA is prepared by copying and labeling the genomic DNA with random primer. The labeled target DNAs thus prepared are then hybridized to the microarray chip under hybridizing conditions, e.g., 6×SSPE/30% formamide at 42° C. for 18 hours, followed by washing in 0.5×SSC and 0.1% SDS at 37° C. for 40 minutes. At positions on the array where the immobilized probe DNA recognizes a complementary target DNA in the sample, hybridization occurs. The labeled target DNA marks the exact position on the array where binding occurs, allowing automatic detection and quantification. The output consists of a list of hybridization events, indicating the relative abundance of specific DNA sequences, and therefore the relative abundance of the corresponding complementary hypermutated cancer gene, in the patient sample. According to one embodiment, the labeled DNA oligomer is a Cy3-labeled DNA. The microarray is then scanned utilizing conventional scanning methods. Image intensities of each spot on the array are proportional to the abundance of the corresponding hypermutated cancer gene in the patient sample.

[0043] The use of the array has several advantages for hypermutated cancer gene copy structural determination. First, the global structural genetic status of several hundred genes can be identified in the same sample at one time point. Second, through careful design of the oligonucleotide probes internal gene rearrangements can be identified. Third, in comparison with Southern blot analysis, the chip requires a small amount of DNA, and provides reproducible results using 2 μg of genomic DNA. Since the assayed regions for each cancer gene are only the exons (coding or non-coding) RNA can be used in place of genomic DNA. The relatively limited number of hypermutated cancer gene (less than 1% of the total human genes) allows the construction of a high detail microarray, with distinct oligonucleotide probes for each frequent genetic alteration. Such a tool would allow for analysis of genetic alterations for many different cancer types under various conditions.

[0044] In addition to use for structural genetic assays of specific cancer genes, a microchip containing cancer genes-specific probe oligonucleotides corresponding to a substantial portion of the cancer hypermutome, preferably the entire hypermutome, may be employed to carry out cancer genes gene structural profiling, for analysis of cancer genes mutation patterns. Distinct cancer genes signatures can be associated with established disease markers, or directly with a disease state.

[0045] According to the mutation profiling methods described herein, DNA or total RNA from a sample from a subject suspected of having a cancer (e.g., a solid cancer) is processed to provide a set of labeled target oligodeoxynucleotides complementary to the DNA or RNA in the sample. The target oligodeoxynucleotides are then hybridized to a microarray comprising hypermutated cancer gene-specific probe oligonucleotides to provide a hybridization profile for the sample. The result is a hybridization profile for the sample representing the mutation pattern of hypermutated cancer gene in the sample. The hybridization profile comprises the signal from the binding of the target oligodeoxynucleotides from the sample to the hypermutated cancer gene-specific probe oligonucleotides in the microarray. The profile may be recorded as the presence or absence of binding (signal vs. zero signal). More preferably, the profile recorded includes the intensity of the signal from each hybridization. The profile is compared to the hybridization profile generated from a normal, i.e., noncancerous, control sample. An alteration in the signal is indicative of the presence of, or propensity to develop, cancer in the subject. Other techniques for measuring hypermutated cancer gene mutations are also within the skill in the art, and include various techniques for determining nucleotide sequences.

[0046] The invention also provides methods of determining the prognosis of a subject with a cancer, comprising assaying the mutations of at least hypermutated cancer gene product, which is associated with a particular prognosis in a cancer (e.g., a good or positive prognosis, a poor or adverse prognosis), in a test sample from the subject. According to these methods, an alteration in the nucleotide sequence or genomic structure of a hypermutated cancer gene product that is associated with a particular prognosis, in the test sample, as compared to the nucleotide sequence or genomic structure of a corresponding hypermutated cancer gene product in a control sample, is indicative of the subject having a cancer with a particular prognosis. In one embodiment, the hypermutated cancer gene gene product is associated with an adverse (i.e., poor) prognosis. Examples of an adverse prognosis include, but are not limited to, low survival rate and rapid disease progression. In certain embodiments, the genomic structure or nucleotide sequence of the at least one hypermutated cancer gene gene product is assayed by labeling the genomic DNA or by reverse transcribing RNA from a test sample obtained from the subject to provide a set of target oligodeoxynucleotides, hybridizing the target oligodeoxynucleotides to a microarray that comprises hypermutated cancer gene-specific probe oligonucleotides to provide a hybridization profile for the test sample, and comparing the test sample hybridization profile to a hybridization profile generated from a control sample.

[0047] Alterations in the nucleotide sequence or the genomic structure of one or more hypermutated cancer gene products in cells can result in the deregulation of the corresponding protein or in the production of an aberrant protein, which can lead to the formation of cancers. Therefore, altering the activity of the hypermutated cancer gene product (e.g., by decreasing the level of a aberrant hypermutated cancer gene product present in cancer cells, or by increasing the level of a wild type hypermutated cancer gene product that is lacking in cancer cells) may successfully treat the cancer.

[0048] Accordingly, the present invention encompasses methods of inhibiting tumorigenesis in subject who has, or is suspected of having, a cancer wherein at least one hypermutated cancer gene product is deregulated in the cancer cells of the subject. When the at least one isolated hypermutated cancer gene product is aberrant or lacking in the cancer cells, the method comprises administering an effective amount of the at least one isolated hypermutated cancer gene product, or an isolated variant or biologically-active fragment thereof, such that proliferation of cancer cells in the subject is inhibited. For example, when a hypermutated cancer gene product is down-regulated in a cancer cell in a subject, administering an effective amount of an isolated hypermutated cancer gene product to the subject can inhibit proliferation of the cancer cell. The isolated hypermutated cancer gene product that is administered to the subject can be identical to the endogenous wild-type hypermutated cancer gene product (e.g., a hypermutated cancer gene product shown in Table 1) that is down-regulated in the cancer cell or it can be a variant or biologically-active fragment thereof. As defined herein, a “variant” of a hypermutated cancer gene product refers to a hypermutated cancer gene that has less than 100% identity to a corresponding wild-type hypermutated cancer gene product and is capable of producing a wild type protein. Such variants includes species variants and variants that are the consequence of one or more mutations in a hypermutated cancer gene. In certain embodiments, the variant is at least about 70%, 75%, 80%, 85%, 90%, 95%, 98%, or 99% identical to a corresponding wild-type hypermutated cancer gene product. As defined herein, a “biologically-active fragment” of a hypermutated cancer gene product refers to an RNA or DNA fragment of a hypermutated cancer gene product that is capable of producing a wild-type or functional hypermutated cancer gene product An isolated hypermutated cancer gene product, or an isolated variant or biologically-active fragment thereof, can be administered to a subject in combination with one or more additional anti-cancer treatments. Suitable anti-cancer treatments include, but are not limited to, chemotherapy, radiation therapy and combinations thereof (e.g., chemoradiation).

[0049] When the at least one isolated hypermutated cancer gene product is up-regulated in the cancer cells, the method comprises administering to the subject an effective amount of at least one compound for inhibiting expression of the at least one hypermutated cancer gene product, referred to herein as hypermutated cancer gene expression-inhibition compounds, such that proliferation of cancer cells is inhibited. In a particular embodiment, the at least one hypermutated cancer gene expression-inhibition compound is specific for a hypermutated cancer gene product selected from the group consisting of NM_{—}001273, NM_{—}080921, NM_{—}014865, NM_{—}003072, NM_{—}004104, NM_{—}004990, NM_{—}004599, NM_{—}013417, NM_{—}172230, NM_{—}148842, NM_{—}021948, NM_{—}014014, NM_{—}001417, NM_{—}002271, NM_{—}005030, NM_{—}182917, NM_{—}001923, NM_{—}005762, NM_{—}005348, NM_{—}001418, NM_{—}002266, NM_{—}012218, NM_{—}002466, NM_{—}005557, NM_{—}000691, NM_{—}001569, NM_{—}001090, NM_{—}201524, NM_{—}002291, NM_{—}002230, NM_{—}001605, NM_{—}017647, NM_{—}002541, NM_{—}005438, NM_{—}133645, XM_{—}290401, NM_{—}000968, NM_{—}144733, NM_{—}004741, NM_{—}020414, NM_{—}004793, NM_{—}000224, NM_{—}006819, XM_{—}379877, NM_{—}001436, NM_{—}004247, NM_{—}000967, NM_{—}199413, NM_{—}032044, NM_{—}013403, NM_{—}012469, NM_{—}003169, NM_{—}006470, NM_{—}021991, XM_{—}290506, NM_{—}153280, NM_{—}080686, NM_{—}000289, NM_{—}003875, NM_{—}024658, NM_{—}003074, NM_{—}152298, NM_{—}007126, NM_{—}139215, NM_{—}147200, XM_{—}290345, XM_{—}377464, NM_{—}021873, NM_{—}006429, NM_{—}015292, NM_{—}005956, NM_{—}001940, NM_{—}000526, NM_{—}001747, NM_{—}024311, NM_{—}003938, NM_{—}005336, NM_{—}003751, NM_{—}006839, NM_{—}000937, NM_{—}012112, NM_{—}006739, NM_{—}005916, NM_{—}138421, NM_{—}001379, NM_{—}006289, NM_{—}004939, NM_{—}001357, NM_{—}000422, NM_{—}002417, NM_{—}005968, NM_{—}003754, XM_{—}378197, NM_{—}002473, NM_{—}002972, NM_{—}000546, NM_{—}001102, XM_{—}374522, NM_{—}001458, NM_{—}172020, XM_{—}039701, NM_{—}000701, NM_{—}002298, NM_{—}015179, NM_{—}002967, NM_{—}018454, NM_{—}006796, NM_{—}005558, NM_{—}006812, NM_{—}003400, NM_{—}001034, NM_{—}004728, NM_{—}178313, NM_{—}145714, XM_{—}085722, NM_{—}001798, NM_{—}181054, NM_{—}001916, NM_{—}002668, NM_{—}052963, NM_{—}031243, NM_{—}002638, NM_{—}003146, NM_{—}005564, NM_{—}016292, XM_{—}375253, NM_{—}003815, NM_{—}001363, NM_{—}032271, NM_{—}000314, NM_{—}198830, NM_{—}032999, NM_{—}015935, NM_{—}134447, NM_{—}006928, NM_{—}014390, NM_{—}020117, NM_{—}001619, NM_{—}022820, NM_{—}005526, NM_{—}033500, NM_{—}001903, NM_{—}004844, NM_{—}006372, NM_{—}022743, NM_{—}007355, NM_{—}012426, NM_{—}000088, NM_{—}182926, NM_{—}004563, NM_{—}014612, NM_{—}004446, XM_{—}168585, NM_{—}014173, NM_{—}144596, NM_{—}138925, NM_{—}174889, NM_{—}006452, NM_{—}004689, NM_{—}015315, XM_{—}379904, NM_{—}014753, NM_{—}198309, NM_{—}002810, NM_{—}002388, NM_{—}014938, NM_{—}018031, NM_{—}023007, NM_{—}002362, NM_{—}006088, NM_{—}002014, NM_{—}003823, NM_{—}030877, NM_{—}003752, NM_{—}001456, NM_{—}006286, NM_{—}145685, NM_{—}003103, NM_{—}002265, NM_{—}005915, XM_{—}376630, NM_{—}006295, NM_{—}145810, NM_{—}015456 and combinations thereof. A hypermutated cancer gene expression-inhibiting compound can be administered to a subject in combination with one or more additional anti-cancer treatments. Suitable anti-cancer treatments include, but are not limited to, chemotherapy, radiation therapy and combinations thereof (e.g., chemoradiation).

[0050] In one embodiment, the isolated cancer gene assayed in the test sample is selected from the group consisting of NM_{—}001273, NM_{—}080921, NM_{—}014865, NM_{—}003072, NM_{—}004104, NM_{—}004990, NM_{—}004599, NM_{—}013417, NM_{—}172230, NM_{—}148842, NM_{—}021948, NM_{—}014014, NM_{—}001417, NM_{—}002271, NM_{—}005030, NM_{—}182917, NM_{—}001923, NM_{—}005762, NM_{—}005348, NM_{—}001418, NM_{—}002266, NM_{—}012218, NM_{—}002466, NM_{—}005557, NM_{—}000691, NM_{—}001569, NM_{—}001090, NM_{—}201524, NM_{—}002291, NM_{—}002230, NM_{—}001605, NM_{—}017647, NM_{—}002541, NM_{—}005438, NM_{—}133645, XM_{—}290401, NM_{—}000968, NM_{—}144733, NM_{—}004741, NM_{—}020414, NM_{—}004793, NM_{—}000224, NM_{—}006819, XM_{—}379877, NM_{—}001436, NM_{—}004247, NM_{—}000967, NM_{—}199413, NM_{—}032044, NM_{—}013403, NM_{—}012469, NM_{—}003169, NM_{—}006470, NM_{—}021991, XM_{—}290506, NM_{—}153280, NM_{—}080686, NM_{—}000289, NM_{—}003875, NM_{—}024658, NM_{—}003074, NM_{—}152298, NM_{—}007126, NM_{—}139215, NM_{—}147200, XM_{—}290345, XM_{—}377464, NM_{—}021873, NM_{—}006429, NM_{—}015292, NM_{—}005956, NM_{—}001940, NM_{—}000526, NM_{—}001747, NM_{—}024311, NM_{—}003938, NM_{—}005336, NM_{—}003751, NM_{—}006839, NM_{—}000937, NM_{—}012112, NM_{—}006739, NM_{—}005916, NM_{—}138421, NM_{—}001379, NM_{—}006289, NM_{—}004939, NM_{—}001357, NM_{—}000422, NM_{—}002417, NM_{—}005968, NM_{—}003754, XM_{—}378197, NM_{—}002473, NM_{—}002972, NM_{—}000546, NM_{—}001102, XM_{—}374522, NM_{—}001458, NM_{—}172020, XM_{—}039701, NM_{—}000701, NM_{—}002298, NM_{—}015179, NM_{—}002967, NM_{—}018454, NM_{—}006796, NM_{—}005558, NM_{—}006812, NM_{—}003400, NM_{—}001034, NM_{—}004728, NM_{—}178313, NM_{—}145714, XM_{—}085722, NM_{—}001798, NM_{—}181054, NM_{—}001916, NM_{—}002668, NM_{—}052963, NM_{—}031243, NM_{—}002638, NM_{—}003146, NM_{—}005564, NM_{—}016292, XM_{—}375253, NM_{—}003815, NM_{—}001363, NM_{—}032271, NM_{—}000314, NM_{—}198830, NM_{—}032999, NM_{—}015935, NM_{—}134447, NM_{—}006928, NM_{—}014390, NM_{—}020117, NM_{—}001619, NM_{—}022820, NM_{—}005526, NM_{—}033500, NM_{—}001903, NM_{—}004844, NM_{—}006372, NM_{—}022743, NM_{—}007355, NM_{—}012426, NM_{—}000088, NM_{—}182926, NM_{—}004563, NM_{—}014612, NM_{—}004446, XM_{—}168585, NM_{—}014173, NM_{—}144596, NM_{—}138925, NM_{—}174889, NM_{—}006452, NM_{—}004689, NM_{—}015315, XM_{—}379904, NM_{—}014753, NM_{—}198309, NM_{—}002810, NM_{—}002388, NM_{—}014938, NM_{—}018031, NM_{—}023007, NM_{—}002362, NM_{—}006088, NM_{—}002014, NM_{—}003823, NM_{—}030877, NM_{—}003752, NM_{—}001456, NM_{—}006286, NM_{—}145685, NM_{—}003103, NM_{—}002265, NM_{—}005915, XM_{—}376630, NM_{—}006295, NM_{—}145810, NM_{—}015456 and combinations thereof. In a particular embodiment, the cancer gene product is NM_{—}001273, NM_{—}080921, NM_{—}014865, NM_{—}003072, NM_{—}004104, NM_{—}004990, NM_{—}004599, NM_{—}013417, NM_{—}172230, NM_{—}148842, NM_{—}021948, NM_{—}014014 or NM_{—}001417. In another embodiment, the cancer gene product is not NM_{—}000546 or NM_{—}000314. In an additional embodiment, the cancer gene product is not NM_{—}198525 or XM_{—}093644. In an additional embodiment, the cancer gene product is not XM_{—}060328, NM_{—}173358, NM_{—}021014, NM_{—}005635, XM_{—}377964, XM_{—}380028, NM_{—}005636, NM_{—}173357, NM_{—}021015, NM_{—}021923, NM_{—}175698, NM_{—}024841, NM_{—}015055, NM_{—}016249, NM_{—}006771, XM_{—}377527, NM_{—}007109, NM_{—}020994, NM_{—}174961, NM_{—}172347, XM_{—}376672, XM_{—}374650, XM_{—}087062, NM_{—}001809, NM_{—}080746, XM_{—}372773, XM_{—}210557, NM_{—}175711, XM_{—}371019, XM_{—}371151, XM_{—}373345, NM_{—}001532, NM_{—}001941, NM_{—}080626, XM_{—}085138, XM_{—}376327, NM_{—}000298, NM_{—}006941, XM_{—}168583, XM_{—}379905, NM_{—}181871, NM_{—}005504, NM_{—}016932, NM_{—}003147, NM_{—}147199, NM_{—}054031, NM_{—}052969, NM_{—}001002, NM_{—}053275, NM_{—}005110, NM_{—}004153, NM_{—}133373, XM_{—}373373, XM_{—}016713, XM_{—}370872, NM_{—}152341, XM_{—}291704, XM_{—}371781, XM_{—}209178, XM_{—}371758, XM_{—}373089, NM_{—}017515, NM_{—}015061, NM_{—}012427, NM_{—}006546, XM_{—}379625, XM_{—}208043, NM_{—}005225, NM_{—}004140, NM_{—}032756, XM_{—}062300, NM_{—}021830, NM_{—}001252, NM_{—}002478, XM_{—}070233, or NM_{—}000315. In a further embodiment, the hypermutated cancer gene product is not NM_{—}002277, NM_{—}198696, NM_{—}052848, NM_{—}025108, NM_{—}018957, NM_{—}052817, NM_{—}020880, NM_{—}177478, NM_{—}019020, NM_{—}007197, NM_{—}006987, NM_{—}033316, NM_{—}012216, or NM_{—}152426. In another embodiment, the cancer gene product is not NM_{—}002034, NM_{—}018706, NM_{—}025265, XM_{—}045581, XM_{—}379215, XM_{—}372315, XM_{—}065899, NM_{—}005929, NM_{—}021795, NM_{—}004995, XM_{—}377110, NM_{—}020385, XM_{—}373949, XM_{—}377797, XM_{—}372916, XM_{—}372966, NM_{—}002280, XM_{—}377904, NM_{—}005686, NM_{—}033035, NM_{—}005547, XM_{—}292596, XM_{—}370710, NM_{—}024671, XM_{—}370988, NM_{—}006385, XM_{—}060535, NM_{—}031211, NM_{—}199182, XM_{—}378858, NM_{—}139177, XM_{—}371658, NM_{—}003771, NM_{—}018000, NM_{—}198855, XM_{—}085578, NM_{—}006681, NM_{—}018131, NM_{—}014321, NM_{—}005634, NM_{—}032792, NM_{—}001973, NM_{—}003202, NM_{—}024762, NM_{—}002278, NM_{—}005224, or NM_{—}001878. In yet another embodiment, the cancer gene product is not NM_{—}024087, NM_{—}022337, NM_{—}015990, NM_{—}002391, NM_{—}138430, NM_{—}023010, NM_{—}006465, NM_{—}018129, NM_{—}013373, NM_{—}017424, XM_{—}292627, NM_{—}003356, NM_{—}004739, NM_{—}153212, NM_{—}145060, XM_{—}371407, NM_{—}002386, XM_{—}372816, NM_{—}080632, XM_{—}370687, NM_{—}001805, or NM_{—}024888.

[0051] The terms “treat”, “treating” and “treatment”, as used herein, refer to ameliorating symptoms associated with a disease or condition, for example, a cancer, including preventing or delaying the onset of the disease symptoms, and/or lessening the severity or frequency of symptoms of the disease or condition. The terms “subject” and “individual” are defined herein to include animals, such as mammals, including, but not limited to, primates, cows, sheep, goats, horses, dogs, cats, rabbits, guinea pigs, rats, mice or other bovine, ovine, equine, canine, feline, rodent, or murine species. In a preferred embodiment, the animal is a human.

[0052] As used herein, an “effective amount” of an isolated hypermutated cancer gene product is an amount sufficient to inhibit proliferation of a cancer cell in a subject suffering from a cancer. One skilled in the art can readily determine an effective amount of a hypermutated cancer gene product to be administered to a given subject, by taking into account factors, such as the size and weight of the subject; the extent of disease penetration; the age, health and sex of the subject, the route of administration, and whether the administration is regional or systemic.

[0053] For example, an effective amount of an isolated hypermutated cancer gene product can be based on the approximate weight of a tumor mass to be treated. The approximate weight of a tumor mass can be determined by calculating the approximate volume of the mass, wherein one cubic centimeter of volume is roughly equivalent to one gram. An effective amount of the isolated hypermutated cancer gene product based on the weight of a tumor mass can be in the range of about 10-500 micrograms/gram of tumor mass. In certain embodiments, the tumor mass can be at least about 10 micrograms/gram of tumor mass, at least about 60 micrograms/gram of tumor mass or at least about 100 micrograms/gram of tumor mass.

[0054] An effective amount of an isolated hypermutated cancer gene product can also be based on the approximate or estimated body weight of a subject to be treated. Preferably, such effective amounts are administered parenterally or enterally, as described herein. For example, an effective amount of the isolated hypermutated cancer gene product is administered to a subject can range from about 5-3000 micrograms/kg of body weight, from about 700-1000 micrograms/kg of body weight, or greater than about 1000 micrograms/kg of body weight.

[0055] One skilled in the art can also readily determine an appropriate dosage regimen for the administration of an isolated hypermutated cancer gene product to a given subject. For example, a hypermutated cancer gene product can be administered to the subject once (e.g., as a single injection or deposition). Alternatively, a hypermutated cancer gene product can be administered once or twice daily to a subject for a period of from about three to about twenty-eight days, more particularly from about seven to about ten days. In a particular dosage regimen, a hypermutated cancer gene product is administered once a day for seven days. Where a dosage regimen comprises multiple administrations, it is understood that the effective amount of the hypermutated cancer gene product administered to the subject can comprise the total amount of gene product administered over the entire dosage regimen.

[0056] As used herein, an “isolated” hypermutated cancer gene product is one that is synthesized, or altered or removed from the natural state through human intervention. For example, a synthetic hypermutated cancer gene product, or a hypermutated cancer gene product partially or completely separated from the coexisting materials of its natural state, is considered to be “isolated.” An isolated hypermutated cancer gene product can exist in substantially-purified form, or can exist in a cell into which the hypermutated cancer gene product has been delivered. Thus, a hypermutated cancer gene product that is deliberately delivered to, or expressed in, a cell is considered an “isolated” hypermutated cancer gene product. A hypermutated cancer gene product produced inside a cell from a messenger RNA is also considered to be an “isolated” molecule. According to the invention, the isolated hypermutated cancer gene products described herein can be used for the manufacture of a medicament for treating a cancer in a subject (e.g., a human).

[0057] Isolated hypermutated cancer gene products can be obtained using a number of standard techniques. For example, the hypermutated cancer gene products can be chemically synthesized or recombinantly produced using methods known in the art. In one embodiment, hypermutated cancer gene products are chemically synthesized using appropriately protected ribonucleoside phosphoramidites and a conventional DNA/RNA synthesizer. Commercial suppliers of synthetic RNA molecules or synthesis reagents include, e.g., Proligo (Hamburg, Germany), Dharmacon Research (Lafayette, Colo., U.S.A.), Pierce Chemical (part of Perbio Science, Rockford, Ill., U.S.A.), Glen Research (Sterling, Va., U.S.A.), ChemGenes (Ashland, Mass., U.S.A.) and Cruachem (Glasgow, UK).

[0058] Alternatively, the hypermutated cancer gene products can be expressed from recombinant circular or linear DNA plasmids using any suitable promoter. Suitable promoters for expressing RNA from a plasmid include, e.g., the U6 or Hi RNA pol III promoter sequences, or the cytomegalovirus promoters. Selection of other suitable promoters is within the skill in the art. The recombinant plasmids of the invention can also comprise inducible or regulatable promoters for expression of the hypermutated cancer gene products in cancer cells.

[0059] The hypermutated cancer gene products that are expressed from recombinant plasmids can be isolated from cultured cell expression systems by standard techniques. The hypermutated cancer gene products that are expressed from recombinant plasmids can also be delivered to, and expressed directly in, the cancer cells. The use of recombinant plasmids to deliver the hypermutated cancer gene products to cancer cells is discussed in more detail below.

[0060] The hypermutated cancer gene products can be expressed from a separate recombinant plasmid, or they can be expressed from the same recombinant plasmid. In one embodiment, the hypermutated cancer gene products are expressed as RNA precursor molecules from a single plasmid, and the precursor molecules are processed into the functional hypermutated cancer gene product by a suitable processing system, including, but not limited to, processing systems extant within a cancer cell. Other suitable processing systems include, e.g., the in vitro Drosophila cell lysate system (e.g., as described in U.S. Published Patent Application No. 2002/0086356 to Tuschl et al., the entire disclosure of which is incorporated herein by reference) and the E. coli RNAse III system (e.g., as described in U.S. Published Patent Application No. 2004/0014113 to Yang et al., the entire disclosure of which is incorporated herein by reference).

[0061] Selection of plasmids suitable for expressing the hypermutated cancer gene products, methods for inserting nucleic acid sequences into the plasmid to express the gene products, and methods of delivering the recombinant plasmid to the cells of interest are within the skill in the art. See, for example, Zeng et al. (2002), Molecular Cell 9:1327-1333; Tuschl (2002), Nat. Biotechnol, 20:446-448; Brummelkamp et al. (2002), Science 296:550-553; Miyagishi et al. (2002), Nat. Biotechnol. 20:497-500; Paddison et al. (2002), Genes Dev. 16:948-958; Lee et al (2002), Nat. Biotechnol. 20:500-505; and Paul et al. (2002), Nat. Biotechnol. 20:505-508, the entire disclosures of which are incorporated herein by reference.

[0062] In one embodiment, a plasmid expressing the hypermutated cancer gene products comprises a sequence encoding a hypermutated cancer gene RNA under the control of the CMV intermediate-early promoter. As used herein, “under the control” of a promoter means that the nucleic acid sequences encoding the hypermutated cancer gene product are located 3′ of the promoter, so that the promoter can initiate transcription of the hypermutated cancer gene product coding sequences.

[0063] The hypermutated cancer gene products can also be expressed from recombinant viral vectors. It is contemplated that the hypermutated cancer gene products can be expressed from two separate recombinant viral vectors, or from the same viral vector. The RNA expressed from the recombinant viral vectors can either be isolated from cultured cell expression systems by standard techniques, or can be expressed directly in cancer cells. The use of recombinant viral vectors to deliver the hypermutated cancer gene products to cancer cells is discussed in more detail below.

[0064] The recombinant viral vectors of the invention comprise sequences encoding the hypermutated cancer gene products and any suitable promoter for expressing the RNA sequences. Suitable promoters include, but are not limited to, the U6 or H1 RNA pol III promoter sequences, or the cytomegalovirus promoters. Selection of other suitable promoters is within the skill in the art. The recombinant viral vectors of the invention can also comprise inducible or regulatable promoters for expression of the hypermutated cancer gene products in a cancer cell.

[0065] Any viral vector capable of accepting the coding sequences for the hypermutated cancer gene products can be used; for example, vectors derived from adenovirus (AV); adeno-associated virus (AAV); retroviruses (e.g., lentiviruses (LV), Rhabdoviruses, murine leukemia virus); herpes virus, and the like. The tropism of the viral vectors can be modified by pseudotyping the vectors with envelope proteins or other surface antigens from other viruses, or by substituting different viral capsid proteins, as appropriate.

[0066] For example, lentiviral vectors of the invention can be pseudotyped with surface proteins from vesicular stomatitis virus (VSV), rabies, Ebola, Mokola, and the like. AAV vectors of the invention can be made to target different cells by engineering the vectors to express different capsid protein serotypes. For example, an AAV vector expressing a serotype 2 capsid on a serotype 2 genome is called AAV 2/2. This serotype 2 capsid gene in the AAV 2/2 vector can be replaced by a serotype 5 capsid gene to produce an AAV 2/5 vector. Techniques for constructing AAV vectors that express different capsid protein serotypes are within the skill in the art; see, e.g., Rabinowitz, J. E., et al. (2002), J. Virol. 76:791-801, the entire disclosure of which is incorporated herein by reference.

[0067] Selection of recombinant viral vectors suitable for use in the invention, methods for inserting nucleic acid sequences for expressing RNA into the vector, methods of delivering the viral vector to the cells of interest, and recovery of the expressed RNA products are within the skill in the art. See, for example, Dornburg (1995), Gene Therap. 2:301-310; Eglitis (1988), Biotechniques 6:608-614; Miller (1990), Hum. Gene Therap. 1:5-14; and Anderson (1998), Nature 392:25-30, the entire disclosures of which are incorporated herein by reference.

[0068] Particularly suitable viral vectors are those derived from AV and AAV. A suitable AV vector for expressing the hypermutated cancer gene products, a method for constructing the recombinant AV vector, and a method for delivering the vector into target cells, are described in Xia et al. (2002), Nat. Biotech. 20:1006-1010, the entire disclosure of which is incorporated herein by reference. Suitable AAV vectors for expressing the hypermutated cancer gene products, methods for constructing the recombinant AAV vector, and methods for delivering the vectors into target cells are described in Samulski et al. (1987), J. Virol. 61:3096-3101; Fisher et al. (1996), J. Virol, 70:520-532; Samulski et al. (1989), J. Virol. 63:3822-3826; U.S. Pat. No. 5,252,479; U.S. Pat. No. 5,139,941; International Patent Application No. WO 94/13788; and International Patent Application No. WO 93/24641, the entire disclosures of which are incorporated herein by reference. In one embodiment, the hypermutated cancer gene products are expressed from a single recombinant AAV vector comprising the CMV intermediate early promoter.

[0069] In a certain embodiment, a recombinant AAV viral vector of the invention comprises a nucleic acid sequence encoding a hypermutated cancer gene RNA in operable connection with a polyT termination sequence under the control of a human U6 RNA promoter. As used herein, “in operable connection with a polyT termination sequence” means that the nucleic acid sequences encoding the sense or antisense strands are immediately adjacent to the polyT termination signal in the 5′ direction. During transcription of the hypermutated cancer gene sequences from the vector, the polyT termination signals act to terminate transcription.

[0070] In other embodiments of the treatment methods of the invention, an effective amount of at least one compound that inhibits hypermutated cancer gene product activity can be administered to the subject. As used herein, “inhibiting hypermutated cancer gene product activity” means that the production of the active form of hypermutated cancer gene product after treatment is less than the amount produced prior to treatment. One skilled in the art can readily determine whether hypermutated cancer gene product activity has been inhibited in a cancer cell, using, for example, the techniques for determining cancer gene transcript or protein product level discussed above for the diagnostic method. Inhibition can occur at the level of gene expression (i.e., by inhibiting transcription of a cancer gene encoding the hypermutated cancer gene product).

[0071] As used herein, an “effective amount” of a compound that inhibits hypermutated cancer gene product activity is an amount sufficient to inhibit proliferation of a cancer cell in a subject suffering from a cancer (e.g., a solid cancer). One skilled in the art can readily determine an effective amount of a hypermutated cancer gene product activity-inhibition compound to be administered to a given subject, by taking into account factors, such as the size and weight of the subject; the extent of disease penetration; the age, health and sex of the subject, the route of administration, and whether the administration is regional or systemic.

[0072] For example, an effective amount of the expression-inhibition compound can be based on the approximate weight of a tumor mass to be treated, as described herein. An effective amount of a compound that inhibits hypermutated cancer gene product activity can also be based on the approximate or estimated body weight of a subject to be treated, as described herein. One skilled in the art can also readily determine an appropriate dosage regimen for administering a compound that inhibits hypermutated cancer gene product activity to a given subject.

[0073] Suitable compounds for inhibiting hypermutated cancer gene expression include double-stranded RNA (such as short- or small-interfering RNA or “siRNA”), antisense nucleic acids, and enzymatic RNA molecules, such as ribozymes. Each of these compounds can be targeted to a given hypermutated cancer gene product and interfere with the expression of (e.g., inhibit translation of, induce cleavage or destruction of) the target hypermutated cancer gene product.

[0074] For example, expression of a given hypermutated cancer gene can be inhibited by inducing RNA interference of the hypermutated cancer gene with an isolated double-stranded RNA (“dsRNA”) molecule which has at least 90%, for example at least 95%, at least 98%, at least 99%, or 100%, sequence homology with at least a portion of the hypermutated cancer gene product. In a particular embodiment, the dsRNA molecule is a “short or small interfering RNA” or “siRNA.”

[0075] siRNA useful in the present methods comprise short double-stranded RNA from about 17 nucleotides to about 29 nucleotides in length, preferably from about 19 to about 25 nucleotides in length. The siRNA comprise a sense RNA strand and a complementary antisense RNA strand annealed together by standard Watson-Crick base-pairing interactions (hereinafter “base-paired”). The sense strand comprises a nucleic acid sequence that is substantially identical to a nucleic acid sequence contained within the target hypermutated cancer gene product.

[0076] As used herein, a nucleic acid sequence in an siRNA which is “substantially identical” to a target sequence contained within the target mRNA is a nucleic acid sequence that is identical to the target sequence, or that differs from the target sequence by one or two nucleotides. The sense and antisense strands of the siRNA can comprise two complementary, single-stranded RNA molecules, or can comprise a single molecule in which two complementary portions are base-paired and are covalently linked by a single-stranded “hairpin” area.

[0077] The siRNA can also be altered RNA that differs from naturally-occurring RNA by the addition, deletion, substitution and/or alteration of one or more nucleotides. Such alterations can include addition of non-nucleotide material, such as to the end(s) of the siRNA or to one or more internal nucleotides of the siRNA, or modifications that make the siRNA resistant to nuclease digestion, or the substitution of one or more nucleotides in the siRNA with deoxyribonucleotides.

[0078] One or both strands of the siRNA can also comprise a 3′ overhang. As used herein, a “3′ overhang” refers to at least one unpaired nucleotide extending from the 3′-end of a duplexed RNA strand. Thus, in certain embodiments, the siRNA comprises at least one 3′ overhang of from 1 to about 6 nucleotides (which includes ribonucleotides or deoxyribonucleotides) in length, from 1 to about 5 nucleotides in length, from 1 to about 4 nucleotides in length, or from about 2 to about 4 nucleotides in length. In a particular embodiment, the 3′ overhang is present on both strands of the siRNA, and is 2 nucleotides in length. For example, each strand of the siRNA can comprise 3′ overhangs of dithymidylic acid (“TT”) or diuridylic acid (“uu”).

[0079] The siRNA can be produced chemically or biologically, or can be expressed from a recombinant plasmid or viral vector, as described above for the isolated hypermutated cancer gene products. Exemplary methods for producing and testing dsRNA or siRNA molecules are described in U.S. Published Patent Application No. 2002/0173478 to Gewirtz and in U.S. Published Patent Application No. 2004/0018176 to Reich et al., the entire disclosures of both of which are incorporated herein by reference.

[0080] Expression of a given hypermutated cancer gene can also be inhibited by an antisense nucleic acid. As used herein, an “antisense nucleic acid” refers to a nucleic acid molecule that binds to target RNA by means of RNA-RNA, RNA-DNA or RNA-peptide nucleic acid interactions, which alters the activity of the target RNA. Antisense nucleic acids suitable for use in the present methods are single-stranded nucleic acids (e.g., RNA, DNA, RNA-DNA chimeras, peptide nucleic acid (PNA)) that generally comprise a nucleic acid sequence complementary to a contiguous nucleic acid sequence in a hypermutated cancer gene product. The antisense nucleic acid can comprise a nucleic acid sequence that is 50-100% complementary, 75-100% complementary, or 95-100% complementary to a contiguous nucleic acid sequence in a hypermutated cancer gene product. Nucleic acid sequences for the hypermutated cancer gene products are provided in Table 1. Without wishing to be bound by any theory, it is believed that the antisense nucleic acids activate RNase H or another cellular nuclease that digests the hypermutated cancer gene product/antisense nucleic acid duplex.

[0081] Antisense nucleic acids can also contain modifications to the nucleic acid backbone or to the sugar and base moieties (or their equivalent) to enhance target specificity, nuclease resistance, delivery or other properties related to efficacy of the molecule. Such modifications include cholesterol moieties, duplex intercalators, such as acridine, or one or more nuclease-resistant groups.

[0082] Antisense nucleic acids can be produced chemically or biologically, or can be expressed from a recombinant plasmid or viral vector, as described above for the isolated hypermutated cancer gene products. Exemplary methods for producing and testing are within the skill in the art; see, e.g., Stein and Cheng (1993), Science 261:1004 and U.S. Pat. No. 5,849,902 to Woolf et al., the entire disclosures of which are incorporated herein by reference.

[0083] Expression of a given hypermutated cancer gene can also be inhibited by an enzymatic nucleic acid. As used herein, an “enzymatic nucleic acid” refers to a nucleic acid comprising a substrate binding region that has complementarity to a contiguous nucleic acid sequence of a hypermutated cancer gene product, and which is able to specifically cleave the hypermutated cancer gene product. The enzymatic nucleic acid substrate binding region can be, for example, 50-100% complementary, 75-100% complementary, or 95-100% complementary to a contiguous nucleic acid sequence in a hypermutated cancer gene product. The enzymatic nucleic acids can also comprise modifications at the base, sugar, and/or phosphate groups. An exemplary enzymatic nucleic acid for use in the present methods is a ribozyme.

[0084] The enzymatic nucleic acids can be produced chemically or biologically, or can be expressed from a recombinant plasmid or viral vector, as described above for the isolated hypermutated cancer gene products. Exemplary methods for producing and testing dsRNA or siRNA molecules are described in Werner and Uhlenbeck (1995), Nucl. Acids Res. 23:2092-96; Hammann et al. (1999), Antisense and Nucleic Acid Drug Dev. 9:25-31; and U.S. Pat. No. 4,987,071 to Cech et al, the entire disclosures of which are incorporated herein by reference.

[0085] Administration of at least one hypermutated cancer gene product, or at least one compound for inhibiting hypermutated cancer gene product activity, will inhibit the proliferation of cancer cells in a subject who has a cancer. As used herein, to “inhibit the proliferation of a cancer cell” means to kill the cell, or permanently or temporarily arrest or slow the growth of the cell. Inhibition of cancer cell proliferation can be inferred if the number of such cells in the subject remains constant or decreases after administration of the hypermutated cancer gene products or hypermutated cancer gene expression-inhibition compounds. An inhibition of cancer cell proliferation can also be inferred if the absolute number of such cells increases, but the rate of tumor growth decreases.

[0086] The number of cancer cells in the body of a subject can be determined by direct measurement, or by estimation from the size of primary or metastatic tumor masses. For example, the number of cancer cells in a subject can be measured by immunohistological methods, flow cytometry, or other techniques designed to detect characteristic surface markers of cancer cells.

[0087] The size of a tumor mass can be ascertained by direct visual observation, or by diagnostic imaging methods, such as X-ray, magnetic resonance imaging, ultrasound, and scintigraphy. Diagnostic imaging methods used to ascertain size of the tumor mass can be employed with or without contrast agents, as is known in the art. The size of a tumor mass can also be ascertained by physical means, such as palpation of the tissue mass or measurement of the tissue mass with a measuring instrument, such as a caliper.

[0088] The hypermutated cancer gene products or hypermutated cancer gene expression-inhibition compounds can be administered to a subject by any means suitable for delivering these compounds to cancer cells of the subject. For example, the hypermutated cancer gene products or hypermutated cancer gene product activity-inhibition compounds can be administered by methods suitable to transfect cells of the subject with these compounds, or with nucleic acids comprising sequences encoding these compounds. In one embodiment, the cells are transfected with a plasmid or viral vector comprising sequences encoding at least one hypermutated cancer gene product or hypermutated cancer gene expression-inhibition compound.

[0089] Transfection methods for eukaryotic cells are well known in the art, and include, e.g., direct injection of the nucleic acid into the nucleus or pronucleus of a cell; electroporation; liposome transfer or transfer mediated by lipophilic materials; receptor-mediated nucleic acid delivery, bioballistic or particle acceleration; calcium phosphate precipitation, and transfection mediated by viral vectors.

[0090] For example, cells can be transfected with a liposomal transfer compound, e.g., DOTAP (N-[1-(2,3-dioleoyloxy)propyl]-N,N,N-trimethyl-ammonium methylsulfate, Boehringer-Mannheim) or an equivalent, such as LIPOFECTIN. The amount of nucleic acid used is not critical to the practice of the invention; acceptable results may be achieved with 0.1-100 micrograms of nucleic acid/105 cells. For example, a ratio of about 0.5 micrograms of plasmid vector in 3 micrograms of DOTAP per 105 cells can be used.

[0091] A hypermutated cancer gene product or hypermutated cancer gene expression-inhibition compound can also be administered to a subject by any suitable enteral or parenteral administration route. Suitable enteral administration routes for the present methods include, e.g., oral, rectal, or intranasal delivery. Suitable parenteral administration routes include, e.g., intravascular administration (e.g., intravenous bolus injection, intravenous infusion, intra-arterial bolus injection, intra-arterial infusion and catheter instillation into the vasculature); peri- and intra-tissue injection (e.g., peri-tumoral and intra-tumoral injection, intra-retinal injection, or subretinal injection); subcutaneous injection or deposition, including subcutaneous infusion (such as by osmotic pumps); direct application to the tissue of interest, for example by a catheter or other placement device (e.g., a retinal pellet or a suppository or an implant comprising a porous, non-porous, or gelatinous material); and inhalation. Particularly suitable administration routes are injection, infusion and direct injection into the tumor.

[0092] In the present methods, a hypermutated cancer gene product or hypermutated cancer gene product expression-inhibition compound can be administered to the subject either as naked RNA, in combination with a delivery reagent, or as a nucleic acid (e.g., a recombinant plasmid or viral vector) comprising sequences that express the hypermutated cancer gene product or hypermutated cancer gene product expression-inhibition compound. Suitable delivery reagents include, e.g., the Mirus Transit TKO lipophilic reagent; lipofectin; lipofectamine; cellfectin; polycations (e.g., polylysine), and liposomes.

[0093] Recombinant plasmids and viral vectors comprising sequences that express the hypermutated cancer gene products or hypermutated cancer gene expression-inhibition compounds, and techniques for delivering such plasmids and vectors to cancer cells, are discussed herein and/or are well known in the art.

[0094] In a particular embodiment, liposomes are used to deliver a hypermutated cancer gene product or hypermutated cancer gene expression-inhibition compound (or nucleic acids comprising sequences encoding them) to a subject. Liposomes can also increase the blood half-life of the gene products or nucleic acids. Suitable liposomes for use in the invention can be formed from standard vesicle-forming lipids, which generally include neutral or negatively charged phospholipids and a sterol, such as cholesterol. The selection of lipids is generally guided by consideration of factors, such as the desired liposome size and half-life of the liposomes in the blood stream. A variety of methods are known for preparing liposomes, for example, as described in Szoka et al. (1980), Ann. Rev. Biophys. Bioeng. 9:467; and U.S. Pat. Nos. 4,235,871, 4,501,728, 4,837,028, and 5,019,369, the entire disclosures of which are incorporated herein by reference. The liposomes for use in the present methods can comprise a ligand molecule that targets the liposome to cancer cells. Ligands that bind to receptors prevalent in cancer cells, such as monoclonal antibodies that bind to tumor cell antigens, are preferred. The liposomes for use in the present methods can also be modified so as to avoid clearance by the mononuclear macrophage system (“MMS”) and reticuloendothelial system (“RES”). Such modified liposomes have opsonization-inhibition moieties on the surface or incorporated into the liposome structure. In a particularly preferred embodiment, a liposome of the invention can comprise both an opsonization-inhibition moiety and a ligand.

[0095] Opsonization-inhibiting moieties for use in preparing the liposomes of the invention are typically large hydrophilic polymers that are bound to the liposome membrane. As used herein, an opsonization-inhibiting moiety is “bound” to a liposome membrane when it is chemically or physically attached to the membrane, e.g., by the intercalation of a lipid-soluble anchor into the membrane itself, or by binding directly to active groups of membrane lipids. These opsonization-inhibiting hydrophilic polymers form a protective surface layer that significantly decreases the uptake of the liposomes by the MMS and RES; e.g., as described in U.S. Pat. No. 4,920,016, the entire disclosure of which is incorporated herein by reference.

[0096] Opsonization-inhibiting moieties suitable for modifying liposomes are preferably water-soluble polymers with a number-average molecular weight from about 500 to about 40,000 daltons, and more preferably from about 2,000 to about 20,000 daltons. Such polymers include polyethylene glycol (PEG) or polypropylene glycol (PPG) derivatives; e.g., methoxy PEG or PPG, and PEG or PPG stearate; synthetic polymers, such as polyacrylamide or poly N-vinyl pyrrolidone; linear, branched, or dendrimeric polyamidoamines; polyacrylic acids; polyalcohols, e.g., polyvinylalcohol and polyxylitol to which carboxylic or amino groups are chemically linked, as well as gangliosides, such as ganglioside GM1. Copolymers of PEG, methoxy PEG, or methoxy PPG, or derivatives thereof, are also suitable. In addition, the opsonization-inhibiting polymer can be a block copolymer of PEG and either a polyamino acid, polysaccharide, polyamidoamine, polyethyleneamine, or polynucleotide. The opsonization-inhibiting polymers can also be natural polysaccharides containing amino acids or carboxylic acids, e.g., galacturonic acid, glucuronic acid, mannuronic acid, hyaluronic acid, pectic acid, neuraminic acid, alginic acid, carrageenan; aminated polysaccharides or oligosaccharides (linear or branched); or carboxylated polysaccharides or oligosaccharides, e.g., reacted with derivatives of carbonic acids with resultant linking of carboxylic groups. Preferably, the opsonization-inhibiting moiety is a PEG, PPG, or a derivative thereof. Liposomes modified with PEG or PEG-derivatives are sometimes called “PEGylated liposomes.”

[0097] The opsonization-inhibiting moiety can be bound to the liposome membrane by any one of numerous well-known techniques. For example, an N-hydroxysuccinimide ester of PEG can be bound to a phosphatidyl-ethanolamine lipid-soluble anchor, and then bound to a membrane. Similarly, a dextran polymer can be derivatized with a stearylamine lipid-soluble anchor via reductive amination using Na(CN)BH₃ and a solvent mixture, such as tetrahydrofuran and water in a 30:12 ratio at 60° C.

[0098] Liposomes modified with opsonization-inhibition moieties remain in the circulation much longer than unmodified liposomes. For this reason, such liposomes are sometimes called “stealth” liposomes. Stealth liposomes are known to accumulate in tissues fed by porous or “leaky” microvasculature. Thus, tissue characterized by such microvasculature defects, for example, solid tumors, will efficiently accumulate these liposomes; see Gabizon, et al. (1988), Proc. Natl. Acad. Sci., U.S.A., 18:6949-53. In addition, the reduced uptake by the RES lowers the toxicity of stealth liposomes by preventing significant accumulation of the liposomes in the liver and spleen. Thus, liposomes that are modified with opsonization-inhibition moieties are particularly suited to deliver the hypermutated cancer gene products or hypermutated cancer gene expression-inhibition compounds (or nucleic acids comprising sequences encoding them) to tumor cells.

[0099] The hypermutated cancer gene products or hypermutated cancer gene expression-inhibition compounds can be formulated as pharmaceutical compositions, sometimes called “medicaments,” prior to administering them to a subject, according to techniques known in the art. Accordingly, the invention encompasses pharmaceutical compositions for treating a cancer. In one embodiment, the pharmaceutical composition comprises at least one isolated hypermutated cancer gene product, or an isolated variant or biologically-active fragment thereof, and a pharmaceutically-acceptable carrier. In a particular embodiment, the at least one hypermutated cancer gene product corresponds to a hypermutated cancer gene product that has a altered gene structure in cancer cells relative to suitable control celisin other embodiments, the pharmaceutical compositions of the invention comprise at least one hypermutated cancer gene product activity-inhibition compound In certain embodiments, the hypermutated cancer gene expression-inhibition compound is specific for one or more hypermutated cancer gene products selected from the group consisting of NM_{—}001273, NM_{—}080921, NM_{—}014865, NM_{—}003072, NM_{—}004104, NM_{—}004990, NM_{—}004599, NM_{—}013417, NM_{—}172230, NM_{—}148842, NM_{—}021948, NM_{—}014014, NM_{—}001417, NM_{—}002271, NM_{—}005030, NM_{—}182917, NM_{—}001923, NM_{—}005762, NM_{—}005348, NM_{—}001418, NM_{—}002266, NM_{—}012218, NM_{—}002466, NM_{—}005557, NM_{—}000691, NM_{—}001569, NM_{—}001090, NM_{—}201524, NM_{—}002291, NM_{—}002230, NM_{—}001605, NM_{—}017647, NM_{—}002541, NM_{—}005438, NM_{—}133645, XM_{—}290401, NM_{—}000968, NM_{—}144733, NM_{—}004741, NM_{—}020414, NM_{—}004793, NM_{—}000224, NM_{—}006819, XM_{—}379877, NM_{—}001436, NM_{—}004247, NM_{—}000967, NM_{—}199413, NM_{—}032044, NM_{—}013403, NM_{—}012469, NM_{—}003169, NM_{—}006470, NM_{—}021991, XM_{—}290506, NM_{—}153280, NM_{—}080686, NM_{—}000289, NM_{—}003875, NM_{—}024658, NM_{—}003074, NM_{—}152298, NM_{—}007126, NM_{—}139215, NM_{—}147200, XM_{—}290345, XM_{—}377464, NM_{—}021873, NM_{—}006429, NM_{—}015292, NM_{—}005956, NM_{—}001940, NM_{—}000526, NM_{—}001747, NM_{—}024311, NM_{—}003938, NM_{—}005336, NM_{—}003751, NM_{—}006839, NM_{—}000937, NM_{—}012112, NM_{—}006739, NM_{—}005916, NM_{—}138421, NM_{—}001379, NM_{—}006289, NM_{—}004939, NM_{—}001357, NM_{—}000422, NM_{—}002417, NM_{—}005968, NM_{—}003754, XM_{—}378197, NM_{—}002473, NM_{—}002972, NM_{—}000546, NM_{—}001102, XM_{—}374522, NM_{—}001458, NM_{—}172020, XM_{—}039701, NM_{—}000701, NM_{—}002298, NM_{—}015179, NM_{—}002967, NM_{—}018454, NM_{—}006796, NM_{—}005558, NM_{—}006812, NM_{—}003400, NM_{—}001034, NM_{—}004728, NM_{—}178313, NM_{—}145714, XM_{—}085722, NM_{—}001798, NM_{—}181054, NM_{—}001916, NM_{—}002668, NM_{—}052963, NM_{—}031243, NM_{—}002638, NM_{—}003146, NM_{—}005564, NM_{—}016292, XM_{—}375253, NM_{—}003815, NM_{—}001363, NM_{—}032271, NM_{—}000314, NM_{—}198830, NM_{—}032999, NM_{—}015935, NM_{—}134447, NM_{—}006928, NM_{—}014390, NM_{—}020117, NM_{—}001619, NM_{—}022820, NM_{—}005526, NM_{—}033500, NM_{—}001903, NM_{—}004844, NM_{—}006372, NM_{—}022743, NM_{—}007355, NM_{—}012426, NM_{—}000088, NM_{—}182926, NM_{—}004563, NM_{—}014612, NM_{—}004446, XM_{—}168585, NM_{—}014173, NM_{—}144596, NM_{—}138925, NM_{—}174889, NM_{—}006452, NM_{—}004689, NM_{—}015315, XM_{—}379904, NM_{—}014753, NM_{—}198309, NM_{—}002810, NM_{—}002388, NM_{—}014938, NM_{—}018031, NM_{—}023007, NM_{—}002362, NM_{—}006088, NM_{—}002014, NM_{—}003823, NM_{—}030877, NM_{—}003752, NM_{—}001456, NM_{—}006286, NM_{—}145685, NM_{—}003103, NM_{—}002265, NM_{—}005915, XM_{—}376630, NM_{—}006295, NM_{—}145810, NM_{—}015456 and combinations thereof.

[0100] Pharmaceutical compositions of the present invention are characterized as being at least sterile and pyrogen-free. As used herein, “pharmaceutical compositions” include formulations for human and veterinary use. Methods for preparing pharmaceutical compositions of the invention are within the skill in the art, for example as described in Remington's Pharmaceutical Science, 17th ed., Mack Publishing Company, Easton, Pa. (1985), the entire disclosure of which is incorporated herein by reference.

[0101] The present pharmaceutical compositions comprise at least one hypermutated cancer gene product or hypermutated cancer gene expression-inhibition compound (or at least one nucleic acid comprising sequences encoding them) (e.g., 0.1 to 90% by weight), or a physiologically-acceptable salt thereof, mixed with a pharmaceutically-acceptable carrier. In certain embodiments, the pharmaceutical compositions of the invention additionally comprise one or more anti-cancer agents (e.g., chemotherapeutic agents). The pharmaceutical formulations of the invention can also comprise at least one hypermutated cancer gene product or hypermutated cancer gene expression-inhibition compound (or at least one nucleic acid comprising sequences encoding them), which are encapsulated by liposomes and a pharmaceutically-acceptable carrier. Especially suitable pharmaceutically-acceptable carriers are water, buffered water, normal saline, 0.4% saline, 0.3% glycine, hyaluronic acid and the like.

[0102] In a particular embodiment, the pharmaceutical compositions of the invention comprise at least one hypermutated cancer gene product or hypermutated cancer gene expression-inhibition compound (or at least one nucleic acid comprising sequences encoding them) that is resistant to degradation by nucleases. One skilled in the art can readily synthesize nucleic acids that are nuclease resistant, for example, by incorporating one or more ribonucleotides that is modified at the 2′-position into the hypermutated cancer gene product. Suitable 2′-modified ribonucleotides include those modified at the 2′-position with fluoro, amino, alkyl, alkoxy, and O-allyl.

[0103] Pharmaceutical compositions of the invention can also comprise conventional pharmaceutical excipients and/or additives. Suitable pharmaceutical excipients include stabilizers, antioxidants, osmolality adjusting agents, buffers, and pH adjusting agents. Suitable additives include, e.g., physiologically biocompatible buffers (e.g., tromethamine hydrochloride), additions of chelants (such as, for example, DTPA or DTPA-bisamide) or calcium chelate complexes (such as, for example, calcium DTPA, CaNaDTPA-bisamide), or, optionally, additions of calcium or sodium salts (for example, calcium chloride, calcium ascorbate, calcium gluconate or calcium lactate). Pharmaceutical compositions of the invention can be packaged for use in liquid form, or can be lyophilized.

[0104] For solid pharmaceutical compositions of the invention, conventional nontoxic solid pharmaceutically-acceptable carriers can be used; for example, pharmaceutical grades of mannitol, lactose, starch, magnesium stearate, sodium saccharin, talcum, cellulose, glucose, sucrose, magnesium carbonate, and the like.

[0105] For example, a solid pharmaceutical composition for oral administration can comprise any of the carriers and excipients listed above and 10-95%, preferably 25%-75%, of the at least one hypermutated cancer gene product or hypermutated cancer gene expression-inhibition compound (or at least one nucleic acid comprising sequences encoding them). A pharmaceutical composition for aerosol (inhalational) administration can comprise 0.01-20% by weight, preferably 1%-10% by weight, of the at least one hypermutated cancer gene product or hypermutated cancer gene expression-inhibition compound (or at least one nucleic acid comprising sequences encoding them) encapsulated in a liposome as described above, and a propellant. A carrier can also be included as desired; e.g., lecithin for intranasal delivery.

[0106] The pharmaceutical compositions of the invention can further comprise one or more anti-cancer agents. In a particular embodiment, the compositions comprise at least one hypermutated cancer gene product or hypermutated cancer gene expression-inhibition compound (or at least one nucleic acid comprising sequences encoding them) and at least one chemotherapeutic agent. Chemotherapeutic agents that are suitable for the methods of the invention include, but are not limited to, DNA-alkylating agents, anti-tumor antibiotic agents, anti-metabolic agents, tubulin stabilizing agents, tubulin destabilizing agents, hormone antagonist agents, topoisomerase inhibitors, protein kinase inhibitors, HMG-CoA inhibitors, CDK inhibitors, cyclin inhibitors, caspase inhibitors, metalloproteinase inhibitors, antisense nucleic acids, triple-helix DNAs, nucleic acids aptamers, and molecularly-modified viral, bacterial and exotoxic agents. Examples of suitable agents for the compositions of the present invention include, but are not limited to, cytidine arabinoside, methotrexate, vincristine, etoposide (VP-16), doxorubicin (adriamycin), cisplatin (CDDP), dexamethasone, arglabin, cyclophosphamide, sarcolysin, methylnitrosourea, fluorouracil, 5-fluorouracil (5FU), vinblastine, camptothecin, actinomycin-D, mitomycin C, hydrogen peroxide, oxaliplatin, irinotecan, topotecan, leucovorin, carmustine, streptozocin, CPT-11, taxol, tamoxifen, dacarbazine, rituximab, daunorubicin, 1-β-D-arabinofuranosylcytosine, imatinib, fludarabine, docetaxel, FOLFOX4.

[0107] The invention also encompasses methods of identifying an inhibitor of tumorigenesis, comprising providing a test agent to a cell and measuring the level of at least one hypermutated cancer gene product in the cell. In one embodiment, the method comprises providing a test agent to a cell and measuring the level of at least one hypermutated cancer gene product associated with DNA mutations in cancer cells. An increase in the level of the hypermutated cancer gene product in the cell after the agent is provided, relative to a suitable control cell (e.g., agent is not provided), is indicative of the test agent being an inhibitor of tumorigenesis In other embodiments the method comprises providing a test agent to a cell and measuring the level of at least one hypermutated cancer gene product associated with DNA mutations in cancer cells. A change in the level of the hypermutated cancer gene product in the cell after the agent is provided, relative to a suitable control cell (e.g., agent is not provided), is indicative of the test agent being an inhibitor of tumorigenesis. In a particular embodiment, at least one hypermutated cancer gene product associated with alered genetic structure in cancer cells is selected from the group consisting of NM_{—}001273, NM_{—}080921, NM_{—}014865, NM_{—}003072, NM_{—}004104, NM_{—}004990, NM_{—}004599, NM_{—}013417, NM_{—}172230, NM_{—}148842, NM_{—}021948, NM_{—}014014, NM_{—}001417, NM_{—}002271, NM_{—}005030, NM_{—}182917, NM_{—}001923, NM_{—}005762, NM_{—}005348, NM_{—}001418, NM_{—}002266, NM_{—}012218, NM_{—}002466, NM_{—}005557, NM_{—}000691, NM_{—}001569, NM_{—}001090, NM_{—}201524, NM_{—}002291, NM_{—}002230, NM_{—}001605, NM_{—}017647, NM_{—}002541, NM_{—}005438, NM_{—}133645, XM_{—}290401, NM_{—}000968, NM_{—}144733, NM_{—}004741, NM_{—}020414, NM_{—}004793, NM_{—}000224, NM_{—}006819, XM_{—}379877, NM_{—}001436, NM_{—}004247, NM_{—}000967, NM_{—}199413, NM_{—}032044, NM_{—}013403, NM_{—}012469, NM_{—}003169, NM_{—}006470, NM_{—}021991, XM_{—}290506, NM_{—}153280, NM_{—}080686, NM_{—}000289, NM_{—}003875, NM_{—}024658, NM_{—}003074, NM_{—}152298, NM_{—}007126, NM_{—}139215, NM_{—}147200, XM_{—}290345, XM_{—}377464, NM_{—}021873, NM_{—}006429, NM_{—}015292, NM_{—}005956, NM_{—}001940, NM_{—}000526, NM_{—}001747, NM_{—}024311, NM_{—}003938, NM_{—}005336, NM_{—}003751, NM_{—}006839, NM_{—}000937, NM_{—}012112, NM_{—}006739, NM_{—}005916, NM_{—}138421, NM_{—}001379, NM_{—}006289, NM_{—}004939, NM_{—}001357, NM_{—}000422, NM_{—}002417, NM_{—}005968, NM_{—}003754, XM_{—}378197, NM_{—}002473, NM_{—}002972, NM_{—}000546, NM_{—}001102, XM_{—}374522, NM_{—}001458, NM_{—}172020, XM_{—}039701, NM_{—}000701, NM_{—}002298, NM_{—}015179, NM_{—}002967, NM_{—}018454, NM_{—}006796, NM_{—}005558, NM_{—}006812, NM_{—}003400, NM_{—}001034, NM_{—}004728, NM_{—}178313, NM_{—}145714, XM_{—}085722, NM_{—}001798, NM_{—}181054, NM_{—}001916, NM_{—}002668, NM_{—}052963, NM_{—}031243, NM_{—}002638, NM_{—}003146, NM_{—}005564, NM_{—}016292, XM_{—}375253, NM_{—}003815, NM_{—}001363, NM_{—}032271, NM_{—}000314, NM_{—}198830, NM_{—}032999, NM_{—}015935, NM_{—}134447, NM_{—}006928, NM_{—}014390, NM_{—}020117, NM_{—}001619, NM_{—}022820, NM_{—}005526, NM_{—}033500, NM_{—}001903, NM_{—}004844, NM_{—}006372, NM_{—}022743, NM_{—}007355, NM_{—}012426, NM_{—}000088, NM_{—}182926, NM_{—}004563, NM_{—}014612, NM_{—}004446, XM_{—}168585, NM_{—}014173, NM_{—}144596, NM_{—}138925, NM_{—}174889, NM_{—}006452, NM_{—}004689, NM_{—}015315, XM_{—}379904, NM_{—}014753, NM_{—}198309, NM_{—}002810, NM_{—}002388, NM_{—}014938, NM_{—}018031, NM_{—}023007, NM_{—}002362, NM_{—}006088, NM_{—}002014, NM_{—}003823, NM_{—}030877, NM_{—}003752, NM_{—}001456, NM_{—}006286, NM_{—}145685, NM_{—}003103, NM_{—}002265, NM_{—}005915, XM_{—}376630, NM_{—}006295, NM_{—}145810, NM_{—}015456.

[0108] Suitable agents include, but are not limited to drugs (e.g., small molecules, peptides), and biological macromolecules (e.g., proteins, nucleic acids). The agent can be produced recombinantly, synthetically, or it may be isolated (i.e., purified) from a natural source. Various methods for providing such agents to a cell (e.g., transfection) are well known in the art, and several of such methods are described hereinabove. Methods for detecting the expression of at least one hypermutated cancer gene product (e.g., Northern blotting, in situ hybridization, RT-PCR, expression profiling) are also well known in the art. Several of these methods are also described hereinabove.

[0109] The invention will now be illustrated by the following non-limiting examples.

[0110] The following Materials and Methods were used in the Examples:

[0111] Databases and algorithms. The dbEST database (Release 23 Jul. 2004), contained more than 5.6 million human ESTs (exceeding 3,009 million nucleotides in length). Library annotations were used to subdivide ESTs in cancer and control. Coding sequences were extracted from Human Genome RefSeq mRNA database (27,184 sequences) and aligned against the ESTs by using BLAST. Total number of analyzed nucleotides corresponding to coding regions was 792,814,405 in cancer libraries and 586,806,978 in control libraries. Perl and Bioperl were used to develop all the scripts and implement the system. BLAST was set to recover up to 500 alignments for each query. A “cancer mismatches” SQL database was populated with a total of 43,965,904 mismatches and gaps extracted from 3,839,543 alignments. The mismatches in the first or last ten nucleotides of the alignments were not considered for subsequent statistical analysis. A candidate mutation was considered only once for each dbEST library, to avoid bias due to RNA copy number. Statistics for amino acid substitutions, synonymous nucleotide substitution and frame-shifts were calculated for each human coding sequence. The 8,972 genes with highest variability in the number of mismatches (IQR>0.5) were retained for cancer testing.

[0112] P-value, q value and false detection rate calculation. Procedures were devised for calculation of gene-specific p-values and false detection rates in each one of the three described tests. Bootstrap analysis was used to compute the adjust probability that a human gene was affected in cancer but not in normal ESTs (paired T test based procedures). The resampling test allowed to define confidence limits for each different gene and to effectively tackle local issues such as DNA composition, CpG occurrence, and protein length. The resampling procedure was performed only on the protein residues found to be above T threshold. For 1000 cycles the ESTs belonging to cancer and normal classes were randomly sampled with replacement, to form two simulated classes with the same size as the original ones. The gene specific p-values were represented by the frequency at which the resampling test scored equal or above that of the respective test. Null p-values were set to half of the lowest p-value in the whole simulation. A range of simulations were performed to choose the lowest number of resampling cycles yielding stable p-values through a short gene list and 1000 cycles were found to be the minimum requirement. An identical procedure was used to calculate false positive detection rates (FDRs), with the exception that also a random measure called the real measure was derived from the first resampling cycle. The overall frequency of the genes with equal or lower p-values then corresponded to the false detection rate (pFDR). The q-values (Storey, J., D. and Tibshirani, R. Proc. Natl. Acad. Sci. USA, 100: 9440-9445 (2003)) were also calculated, by using QVALUE package, which uses the list of p-values resulting from the simultaneous testing of 8972 human genes and estimates their q-values. The robust bootstrap method was used to calculate pi_{—}0 when estimating no, therefore the q-value estimate is a direct finite sample estimate of pFDR. There was essentially very strong agreement between the calculated FDRs and the q-values for the cancer genes.

[0113] FIG. 1 shows a flow diagram shows the overall procedure for discovery of the mutated human genes in cancer. Since ESTs are single pass sequences, they often contain sequencing errors. To attenuate this problem the procedure retrieved candidate mutations only in the region of maximum nucleotide identity to the query. Notwithstanding this, the main assumption was that equal sequencing error rate is present in the two dbEST populations, those derived from control and those from cancer cells. Therefore, after normalization, the sequencing errors are essentially balanced out when the cancer and control comparison is performed by t test over a large enough sliding window. The p-values were calculated by using bootstrap analysis. To detect point mutations associated to library haplotypes rather than to mRNA copies each mismatch was recorded only once for each different library. Nevertheless no difference in the p-values for the most significant genes was apparent when this “haplotype” filter was disabled. The test for NS to S ratio, measuring selective pressure for amino acid mutation, should be relatively resilient to presence of sequencing errors and differential expression and was implemented to identify causal mutations. The deletions/amplifications were measured by an in-silico array CGH-like method.

### EXAMPLE 1

### Identification of Genes with High Frequency of Amino Acid Substitutions in Cancer

[0114] Statistics. In the first of three different measures relating to point mutations, the frequency of amino acid substitution over a 25-codons window was compared for each gene in normal and cancerous tissues by using paired T test. Normalization of mismatches for the control and cancer classes was attained by using a gene specific local normalization factor. The factor was derived by dividing the respective counts of ESTs in both classes at each nucleotide position of the query. The score assigned to each human RefSeq gene corresponded to the sum of the T scores values exceeding the confidence limit for p<0.05 over the sliding window (i.e. the area of the peak in the graph above the threshold). P-values (pSubs) were obtained by using bootstrap analysis, randomly selecting, 1000 times, ESTs derived from cancer and normal tissues.

[0115] The following point mutation test consisted in the evaluation of the selective pressure for amino acids changes in genes encoding cancer proteins. This filter was implemented in order to separate causal from bystander mutations. The ratios of non-synonymous (NS) to synonymous (S) nucleotide substitutions within the cancer and normal ESTs were calculated for each RefSeq entry. A paired T-test was used to compare the cancer and normal NS/S substitution ratios at different codons in each RefSeq entry. When the number of synonymous substitutions at denominator was null, unity was added to both numerator and denominator. Only the amino acid positions found to be significant for amino acid substitutions (in the first approach) were evaluated here. The gene specific p-values (pNSSR) and FDR for the NS to S comparison were again obtained by bootstrap, randomly selecting ESTs derived from cancer and normal tissues.

[0116] Results. Different statistical tests were combined to identify the genes which are often and extensively mutated in cancer with the purpose of reducing the number of false positives. Starting from a complete human mRNA repository, 27,184 coding sequences were aligned to more than 5.6 million human EST sequences. BLAST produced successful alignments for 24,932 human open reading frames and 33,614,754 mismatches were recorded in a cancer mismatches database. 792,814,405 nucleotides were analyzed corresponding to coding regions for the cancer class and 586,806,978 for the control. ESTs are present in cDNA libraries proportionally to the expression of the respective genes. Thus the abundance of a gene was defined as the relative frequency of its analyzed nucleotides in that class. Gene specific fold changes in cancer vs. control were calculated by dividing the respective abundances in the two classes. Filtering was then performed to pass only genes which had a high number of mismatches irrespective of cancer status. Inter-quantile range (IQR) was therefore applied and 8,972 genes with IQR larger than 0.5 were retained for further analysis.

[0117] When looking for frequent amino acid substitutions, after normalization, a paired T test was applied to sliding windows of 25 codons. To perform robust tests a codon in the test was considered only when aligned at least 10 times in each class, control and cancer. This technique was chosen to filter noise, i.e. sequencing errors, and to select genes with short range clustering of frequent mutations. For each gene a p-value (pSubs) was then associated to the area of the peaks composed by the significant t scores. The p-value was calculated by bootstrap analysis. As an example, the plot of the T scores for each 25-codons window in the coding region of TP53 cancer gene is shown in FIG. 2. The region of Aa substitutions well overlaps with the TP53 DNA binding domain, which is mutated most frequently in human cancer. Bootstrap was then used again to compute the genome-wide false positive detection rate (pFDR) resulting by multiple testing and considered the number of proteins above threshold as the number of false positives present in the identified cancer genes.

### EXAMPLE 2

### Identification of Genes with High Frequency of Frame-Shift Mutations in Cancer Cells

[0118] Statistics: In the second example, a T-test based procedure similar to that of Example 1 was applied to the number of frame-shifts induced by 1 nucleotide insertions or deletions. Longer DNA alterations were not recorded, as they were very rare. Frame-shifts of one base will generally produce premature protein termination or other major differences in primary structure.

[0119] Results: A bias could be present in the measures described in Example 1 due to passenger mutations produced by altered DNA repair systems in some cancer cells. For this reason an unbiased test was additionally implemented, using the ratio of non-synonymous (NS) to synonymous (S) DNA mutations. This represents a measure of the selective mutation pressure during tumour progression, as synonymous alterations are unlikely to exert a growth advantage and will be selectively lost (Samuels, Y. et al. Science 304:554 (2004)). The codons significant for amino acid substitutions (p<0.05) were evaluated with this test to generate the relative gene specific probability (pNSSR). The NS/S ratios in the TP53 mutated region were found to be higher than in the normal tissues by paired T test (p<0.033, FDR=0.092) and are shown in graph of FIG. 2. The probability of a protein having frequent amino acid changes coupled with selective positive pressure in cancer, pAa, events which are not independent, was defined as the average of the respective pSubs and pNSSR p-values.

[0120] FIG. 2 shows Profile of TP53 point mutation analysis in human cancer ESTs. When applied to TP53 each one of the three cancer mutation tests yielded significant p-values. The p-value for amino acid substitution (pSubs) was 0.022, while the ratio of NS to S mismatches over the mutated region was found to be significantly higher than in normal tissues (pNNSR=0.031, FDR=0.092). Only one hundred and ninety one transcripts had a p-value for 1 bp frame-shifts lower or equal to that of TP53 (p-value=0.0005 and FDR=0.047). The thick line shows the paired T score for amino acid mutations in cancer vs. normal ESTs, while the thin line shows the paired T score for 1 nucleotide frameshifts. The open squares show the difference between the NS/S ratio in cancer and in normal ESTs. It is apparent that there are higher absolute value NS/S ratios in cancer. In fact positive NS/S differences (black) are higher in number and larger in absolute value than the negative ones (gray). Gene specific confidence limits for the paired T test were calculated by bootstrap analysis. Two classes were composed by random extracting 1000 times with replacement cancer or normal status from the library classes (Efron and Tibshirani, 1993; Davison et al, 1997).

### EXAMPLE 3

### Identification of Genes with High Frequency of Partial Gene Deletion/Amplification in Cancer Cells

[0121] Data Mining The frequency at each nucleotide position of each open reading frame in the cancer and control libraries was then used to perform an in-silico ECGH (expression CGH like), where the nucleotide frequencies were assimilated to the fluorescence intensity. Conditions required for the CGH test were of a minimal intensity of in each of the classes. These conditions ensured that robust measures were considered. The gene score corresponded to the number of significant 1092 intensity ratios (CL were mean +−2×SD, i.e. −0.02+−2×0.37). The standard deviation and mean for 1092 intensity ratios were calculated on all the genes, after removing 2000 of those scoring highest for point mutations in the previous tests. In this distribution median and mean were identical. Genes were ranked according to the scores.

[0122] Results: Additional distortion in the system is introduced by relative abundance of mRNA levels which change in cancer and control tissues. Although normalization was carried out, genes that are over-expressed in cancer are still more likely to present “candidate cancer amino acid substitutions” and vice-versa. Thus a penalty was included for those genes which are more transcribed in cancer libraries by multiplying each gene pAa and pFS by the relative probability of being present in a cancer tissue. This probability, pCancer, was defined as the relative abundance in cancer divided by the sum of the relative abundance in the two classes. The probability of a protein having cancer specific amino acid substitutions and frame-shifts, two independent events, was defined as the product of the respective corrected p-values (pAa×pCancer×pFS×pCancer). Thus the p-value threshold for cancer mutation significance becomes 2.5×10⁻⁵ (corresponding to a p-value of 0.01 in each one of three tests and an equal expression in cancer and control tissues). In the point mutation tests, TP53 and PTEN ranked 236 and 242 respectively (pFDR=0.0035, p-value<7×10⁻⁶). The q-value was used to measures the proportion of false positives incurred (called the false discovery rate) in the cancer point mutation test (Storey and Tibshirani, 2003). Overall 361 different human transcripts had p-values lower than 2.5×10⁻⁵ with q-values<=0.0026. Some oncogenes like for example ErbB2 were also present among this point mutated gene set. ErbB2 was recently reported to be frequently mutated in lung cancer (Stevens et al, 2004).

[0123] The identification of clusters of point mutations in the EST database is severely affected by many issues as described above. Thus another independent criterion was added for cancer gene selection, based on gene deletions and amplifications. To this end an in-silico ECGH (expression CGH) experiment was devised and performed, by measuring the relative frequencies of every mRNA position in cancer and control ESTs. By analogy to array CGH, each DNA position in an open reading frame can be considered as a probe and its frequency in the cancer and controls can be assimilated to the intensities of the two fluorescence channels. The absolute frequency within a cDNA clone population can be variable, being a function of the cloning procedure and it is generally higher towards the 3′ end of the messenger RNA. Nevertheless the ratio of the frequencies at each position in the two classes should be constant. In principle, after normalization, the frequency ratios should be close to 1, if no deletions or amplifications are encountered. In the test an exon position was considered only when its frequency was at least of 10 in each of the classes. This filter ensured that low intensity signals were excluded and robust measures could be produced. The in-silico ECGH procedure should be unaffected by the sequencing errors present in the ESTs since it is based on the presence of an exon element rather than the base called at that position. Thus this method well complements those used above for point mutations. The “in silico ECGH” profile for TP53 is shown in FIG. 3. For each gene the log ratios were scored when distant more than two standard deviations from the mean. The standard deviation and mean were calculated on all the genes, after removing those most significant for point mutations. Different Isoforms often appear to be selected by ECGH in similar protein regions (i.e. DDX1, DDX21, TRIM, MCM). Since the homology level is below BLAST stringency this results can not be ascribed to sequence conservation, rather are common mechanisms associated to cancer. This ECGH method though can not technically distinguish genomic rearrangements from differential exon usage in cancer and normal tissues. For example, The two variants of heterogeneous nuclear ribonucleoprotein A2/B1 (HNRPA2B1) could be detected. The transcript variant B1 and A2 differ from 12 Aa at the amino-terminus and precisely these were identified by the algorithm. Furthermore C-terminus variants can also be detected (i.e. PSMD4 proteasome (prosome, macropain) 26S subunit, non-ATPase, 4). On the other hand most often the detected alteration does not map to any alternative exon or splicing variant. Overall the ECGH ranking is still highly relevant to cancer since both detected putative genomic rearrangement and/or alternative exon usage are associated to functional cancer protein variants.

### EXAMPLE 4

### Identification of Hypermutated Cancer Genes with High Frequency of Overall Mutations and Genomic Structural Alterations in Cancer Cells

[0124] Statistics: A final list of the hypermutated cancer genes was compiled by averaging the rank orders of each one of the three tests: amino acid substitution, single nucleotide frame-shift, partial gene deletion/amplification.

[0125] Results: PTEN and TP53 ranked respectively 96 and 130 best among the human transcripts, indicating a success of our technique in enriching for cancer genes. The top ranking genes are reported in Table I. While both PTEN and TP53 recessive cancer genes increase their ranks after combining point mutation selection with the in silico CGH analysis, other dominant cancer genes, like for example ErbB2 decrease their standings. This might reflect the propensity of the in silico CGH test to identify genes which are inactivated by partial gene rearrangements. Interestingly protein kinases are present in the expected frequency by random association (only 4 in the top 185 ranking genes).

[0126] For each putative cancer gene, the altered coding regions were then pinpointed. To this purpose gene specific confidence limits for both amino acid substitution and deletions/insertions (p<0.05) were calculated by using bootstrap. These mRNA segments thus define the minimal region of human transcriptome which is mutated in cancer

[0127] The molecular functions, biological processes and cellular compartments associated with the cancer mutated genes were statistically evaluated using GOAL (Volinia, S. et al. Nucleic Acids Res. 32:W492-9 (2004)). Most of the functions and processes identified are known to be involved in cancer pathogenesis, such as apoptosis, regulation of cell cycle, cell adhesion, chromatin, protein phosphorylation, dephosphorylation and ubiquitination. In parallel, gene networks of mutated genes were constructed by means of automated literature data mining. PubGene was used to assess the hypothesis that the mutated mRNAs included coherent groupings. When mutated cancer genes were analysed, 145 significant gene networks (score>0.718, p-value<0.01) were identified. To assess these results the PubGene analysis was repeated on each of ten random gene selections. In this simulation the number of significant gene networks (i.e. with p-value<0.01) was never higher than 27, (mean=18.3, standard deviation=8.47); therefore the presence of 145 gene networks in the identified cancer genes reveals bona-fide relations (p-value<0.001).

[0128] The possibility that the mismatches identified here might correspond to rare polymorphisms rather than mutations was evaluated. Recently, Qiu and co-workers (2004) measured SNP-tumour association in the EST database. Their analysis was restricted to mutations described in the SNP database. They identified 327 SNPs more frequent in tumours and which induced amino acid substitution. Interestingly, neither landmark cancer genes, such as TP53 and PTEN, nor any of the genes identified here are present within their significant ESTs. However that is not a formal demonstration that the genes identified correspond to somatic mutation targets, although TP53 is evidence in favour of this hypothesis. Furthermore it is possible that some of the detected mutations are germine and constitute genetically predisposed background to cancer insurgence. Finally our results for the first time indicate that data from genome sequencing can be used for systematically detect partial gene deletions/amplifications.

[0129] The relevant teachings of all publications cited herein that have not explicitly been incorporated by reference, are incorporated herein by reference in their entirety. While this invention has been particularly shown and described with references to preferred embodiments thereof, it will be understood by those skilled in the art that various changes in form and details may be made therein without departing from the scope of the invention encompassed by the appended claims.

The application's sequence listing, which the Patent Office published only in electronic form, follows.

SEQUENCE LISTING (179 sequences)

SEQ ID NO: 1 - DNA, 6511 bp, Homo sapiens
  mRNA (1)..(6511): NM_001273.2| Homo sapiens chromodomain helicase DNA binding protein 4 (CHD4)
attttccccccttcggccgcggcgaggaggagccggagcgggagtgacaccgagccggacccagcgcgacctgcggcggctccgggtgactcgggccagtgtagaggtcctcaggccgccggcaggagcagctgggccaattccctggccgggagcggaaggggatggcgtcgggcctgggctccccgtccccctgctcggcgggcagtgaggaggaggatatggatgcacttttgaacaacagcctgcccccaccccacccagaaaatgaagaggacccagaagaggatttgtcagaaacagagactccaaagctcaagaagaagaaaaagcctaagaaacctcgggaccctaaaatccctaagagcaagcgccaaaaaaaggagcgtatgctcttatgccggcagctgggggacagctctggggaggggccagagtttgtggaggaggaggaagaggtggctctgcgctcagacagtgagggcagcgactatactcctggcaagaagaagaagaagaagcttggacctaagaaagagaagaagagcaaatccaagcggaaggaggaggaggaggaggaggatgatgatgatgattcaaaggagcctaaatcatctgctcagctcctggaagactggggcatggaagacattgaccacgtgttctcagaggaggattatcgaaccctcaccaactacaaggccttcagccagtttgtcagacccctcattgctgccaaaaatcccaagattgctgtctccaagatgatgatggttttgggtgcaaaatggcgggagttcagtaccaataaccccttcaaaggcagttctggggcatcagtggcagctgcggcagcagcagcggtagctgtggtggagagcatggtgacagccactgaggttgcaccaccacctccccctgtggaggtgcctatccgcaaggccaagaccaaggagggcaaaggtcccaatgctcggaggaagcccaagggcagccctcgtgtacctgatgccaagaagcctaaacccaagaaagtagctcccctgaaaatcaagctgggaggttttggttccaagcgtaagagatcctcgagtgaggatgatgacttagatgtggaatctgacttcgatgatgccagtatcaatagctattctgtttctgatggttccaccagccgtagtagccgcagccgcaagaaactccgaaccactaaaaagaaaaagaaaggcgaggaggaggtgactgctgtggatggttatgagacagaccaccaggactattgcgaggtgtgccagcaaggcggtgagatcatcctgtgtgatacctgtccccgtgcttaccacatggtctgcctggatcccgacatggagaaggctcccgagggcaagtggagctgcccacactgcgagaaggaaggcatccagtgggaagctaaagaggacaattcggagggtgaggagatcctggaagaggttgggggagacctcgaagaggaggatgaccaccatatggaattctgtcgggtctgcaaggatggtggggaactgctctgctgtgatacctgtccttcttcctaccacatccactgcctgaatcccccacttccagagatccccaacggtgaatggctctgtccccgttgtacgtgtccagctctgaagggcaaagtgcagaagatcctaatctggaagtggggtcagccaccatctcccacaccagtgcctcggcctccagatgctgatcccaacacgccctccccaaagcccttggaggggcggccagagcggcagttctttgtgaaatggcaaggcatgtcttactggcactgctcctgggtttctgaactgcagctggagctgcactgtcaggtgatgttccgaaactatcagcggaagaatgatatggatgagccaccttctggggactttggtggtgatgaagagaaaagccgaaagcgaaagaacaaggaccctaaatttgcagagatggaggaacgcttctatcgctatgggataaaacccgagtggatgatgatccaccgaatcctcaaccacagtgtggacaagaagggccacgtccactacttgatcaagtggcgggacttaccttacgatcaggcttcttgggagagtgaggatgtggagatccaggattacgacctgttcaagcagagctattggaatcacagggagttaatgaggggtgaggaaggccgaccaggcaagaagctcaagaaggtgaagcttcggaagttggagaggcctccagaaacgccaacagttgatccaacagtgaagtatgagcgacagccagagtacctggatgctacaggtggaaccctgcacccctatcaaatggagggcctgaattggttgcgcttctcctgggctcagggcactgacaccatcttggctgatgagatgggccttgggaaaactgtacagacagcagtcttcctgtattccctttacaaggagggtcattccaaaggccccttcctagtgagcgcccctctttctaccatcatcaactgggagcgggagtttgaaatgtgggctccagacatgtatgtcgtaacctatgtgggtgacaaggacagccgtgccatcatccgagagaatgagttctcctttgaagacaatgccattcgtggtggcaagaaggcctcccgcatgaagaaagaggcatctgtgaaattccatgtgctgctgacatcctatgaattgatcaccattgacatggctattttgggctctattgattgggcctgcctcatcgtggatgaagcccatcggctgaagaacaatcagtctaagttcttccgggtattgaatggttactcactccagcacaagctgttgctgactgggacaccattacaaaacaatctggaagagttgtttcatctgctcaactttctcacccccgagaggttccacaatttggaaggttttttggaggagtttgctgacattgccaaggaggaccagataaaaaaactgcatgacatgctggggccgcacatgttgcggcggctcaaagccgatgtgttcaagaacatgccctccaagacagaactaattgtgcgtgtggagctgagccctatgcagaagaaatactacaagtacatcctcactcgaaattttgaagcactcaatgcccgaggtggtggcaaccaggtgtctctgctgaatgtggtgatggatcttaagaagtgctgcaaccatccatacctcttccctgtggctgcaatggaagctcctaagatgcctaatggcatgtatgatggcagtgccctaatcagagcatctgggaaattattgctgctgcagaaaatgctcaagaaccttaaggagggtgggcatcgtgtactcatcttttcccagatgaccaagatgctagacctgctagaggatttcttggaacatgaaggttataaatacgaacgcatcgatggtggaatcactgggaacatgcggcaagaggccattgaccgcttcaatgcaccgggtgctcagcagttctgcttcttgctttccactcgagctgggggccttggaatcaatctggccactgctgacacagttattatctatgactctgactggaacccccataatgacattcaggcctttagcagagctcaccggattgggcaaaataaaaaggtaatgatctaccggtttgtgacccgtgcgtcagtggaggagcgcatcacgcaggtggcaaagaagaaaatgatgctgacgcatctagtggtgcggcctgggctgggctccaagactggatctatgtccaaacaggagcttgatgatatcctcaaatttggcactgaggaactattcaaggatgaagccactgatggaggaggagacaacaaagagggagaagatagcagtgttatccactacgatgataaggccattgaacggctgctagaccgtaaccaggatgagactgaagacacagaattgcagggcatgaatgaatatttgagctcattcaaagtggcccagtatgtggtacgggaagaagaaatgggggaggaagaggaggtagaacgggaaatcattaaacaggaagaaagtgtggatcctgactactgggagaaattgctgcggcaccattatgagcagcagcaagaagatctagcccgaaatctgggcaaaggaaaaagaatccgtaaacaggtcaactacaatgatggctcccaggaggaccgagattggcaggacgaccagtccgacaaccagtccgattactcagtggcttcagaggaaggtgatgaagactttgatgaacgttcagaagctccccgtaggcccagtcgtaagggcctgcggaatgataaagataagccattgcctcctctgttggcccgtgttggtgggaatattgaagtacttggttttaatgctcgtcagcgaaaagcctttcttaatgcaattatgcgatatggtatgccacctcaggatgcttttactacccagtggcttgtaagagacctgcgaggcaaatcagagaaagagttcaaggcatatgtctctcttttcatgcggcatttatgtgagccgggggcagatggggctgagacctttgctgatggtgtcccccgagaaggcctgtctcgccagcatgtccttactagaattggtgttatgtctttgattcgcaagaaggttcaggagtttgaacatgttaatgggcgctggagcatgcctgaactggctgaggtggaggaaaacaagaagatgtcccagccagggtcaccctccccaaaaactcctacaccctccactccaggggacacgcagcccaacactcctgcacctgtcccacctgctgaagatgggataaaaatagaggaaaatagcctcaaagaagaagagagcatagaaggagaaaaggaggttaaatctacagcccctgagactgccattgagtgtacacaggcccctgcccctgcctcagaggatgaaaaggtcgttgttgaaccccctgagggagaggagaaagtggaaaaggcagaggtgaaggagagaacagaggaacctatggagacagagcccaaaggtgctgctgatgtagagaaggtggaggaaaagtcagcaatagatctgacccctattgtggtagaagacaaagaagagaagaaagaagaagaagagaaaaaagaggtgatgcttcagaatggagagacccccaaggacctgaatgatgagaaacagaagaaaaatattaaacaacgtttcatgtttaacattgcagatggtggttttactgagttgcactccctttggcagaatgaagagcgggcagccacagttaccaagaagacttatgagatctggcatcgacggcatgactactggctgctagccggcattataaaccatggctatgcccggtggcaagacatccagaatgacccacgctatgccatcctcaatgagcctttcaagggtgaaatgaaccgtggcaatttcttagagatcaagaataaatttctagctcgaaggtttaagctcttagaacaagctctggtgattgaggaacagctgcgccgggctgcttacttgaacatgtcagaagacccttctcacccttccatggccctcaacacccgctttgctgaggtggagtgtttggcggaaagtcatcagcacctgtccaaggagtcaatggcaggaaacaagccagccaatgcagtcctgcacaaagttctgaaacagctggaagaactgctgagtgacatgaaagctgatgtgactcgactcccagctaccattgcccgaattcccccagttgctgtgaggttacagatgtcagagcgtaacattctcagccgcctggcaaaccgggcacccgaacctaccccacagcaggtagcccagcagcagtgaagatgcagactgataccacctccaccgctgagcagtgaccttcctcactttctcttgtcccagcttctcccctgggggcctgagagaccctcaccttccttctgcccatcttccatgttgtaaaggaacagccccagtgcactgggggaggggagggagtgaggggcagtggtgcccttcctgcagaagagacatgcagcagtagcgctggcgccatctgcaggagctggcgggctggccttctggaccctggcttctccccactgtaacgcctgttacacacaaactgttgtgggttcctgccaggcttgaagaaaatgatctgaattttttcctccttttggttttattttgttggtttattttgtgttttcttttctcctttttggggggtattcagagtgggctgggcccctgggcgagacacagctacctctgttggcatctttttaataccaggaacccagcggctctagccactgagcggctaaatgaaataaagtggaaaaaaaaaaaaaggaaaaaaccaaaagcataaaaaaccacagcaaatttcttgatgaaaattgaaaataaaagtttccttgtattttaaaaaaaaaaaaaaa

SEQ ID NO: 2 - DNA, 4543 bp, Homo sapiens
  mRNA (1)..(4543): NM_080921.1| Homo sapiens protein tyrosine phosphatase, receptor type, C (PTPRC), transcript variant 2
agaggaggaaattgttcctcgtctgataagacaacagtggagaaaggacgcatgctgtttcttagggacacggctgacttccagatatgaccatgtatttgtggcttaaactcttggcatttggctttgcctttctggacacagaagtatttgtgacagggcaaagcccaacaccttcccccactgatgcctaccttaatgcctctgaaacaaccactctgagcccttctggaagcgctgtcatttcaaccacaacaatagctactactccatctaagccaacatgtgatgaaaaatatgcaaacatcactgtggattacttatataacaaggaaactaaattatttacagcaaagctaaatgttaatgagaatgtggaatgtggaaacaatacttgcacaaacaatgaggtgcataaccttacagaatgtaaaaatgcgtctgtttccatatctcataattcatgtactgctcctgataagacattaatattagatgtgccaccaggggttgaaaagtttcagttacatgattgtacacaagttgaaaaagcagatactactatttgtttaaaatggaaaaatattgaaacctttacttgtgatacacagaatattacctacagatttcagtgtggtaatatgatatttgataataaagaaattaaattagaaaaccttgaacccgaacatgagtataagtgtgactcagaaatactctataataaccacaagtttactaacgcaagtaaaattattaaaacagattttgggagtccaggagagcctcagattattttttgtagaagtgaagctgcacatcaaggagtaattacctggaatccccctcaaagatcatttcataattttaccctctgttatataaaagagacagaaaaagattgcctcaatctggataaaaacctgatcaaatatgatttgcaaaatttaaaaccttatacgaaatatgttttatcattacatgcctacatcattgcaaaagtgcaacgtaatggaagtgctgcaatgtgtcatttcacaactaaaagtgctcctccaagccaggtctggaacatgactgtctccatgacatcagataatagtatgcatgtcaagtgtaggcctcccagggaccgtaatggcccccatgaacgttaccatttggaagttgaagctggaaatactctggttagaaatgagtcgcataagaattgcgatttccgtgtaaaagatcttcaatattcaacagactacacttttaaggcctattttcacaatggagactatcctggagaaccctttattttacatcattcaacatcttataattctaaggcactgatagcatttctggcatttctgattattgtgacatcaatagccctgcttgttgttctctacaaaatctatgatctacataagaaaagatcctgcaatttagatgaacagcaggagcttgttgaaagggatgatgaaaaacaactgatgaatgtggagccaatccatgcagatattttgttggaaacttataagaggaagattgctgatgaaggaagactttttctggctgaatttcagagcatcccgcgggtgttcagcaagtttcctataaaggaagctcgaaagccctttaaccagaataaaaaccgttatgttgacattcttccttatgattataaccgtgttgaactctctgagataaacggagatgcagggtcaaactacataaatgccagctatattgatggtttcaaagaacccaggaaatacattgctgcacaaggtcccagggatgaaactgttgatgatttctggaggatgatttgggaacagaaagccacagttattgtcatggtcactcgatgtgaagaaggaaacaggaacaagtgtgcagaatactggccgtcaatggaagagggcactcgggcttttggagatgttgttgtaaagatcaaccagcacaaaagatgtccagattacatcattcagaaattgaacattgtaaataaaaaagaaaaagcaactggaagagaggtgactcacattcagttcaccagctggccagaccacggggtgcctgaggatcctcacttgctcctcaaactgagaaggagagtgaatgccttcagcaatttcttcagtggtcccattgtggtgcactgcagtgctggtgttgggcgcacaggaacctatatcggaattgatgccatgctagaaggcctggaagccgagaacaaagtggatgtttatggttatgttgtcaagctaaggcgacagagatgcctgatggttcaagtagaggcccagtacatcttgatccatcaggctttggtggaatacaatcagtttggagaaacagaagtgaatttgtctgaattacatccatatctacataacatgaagaaaagggatccacccagtgagccgtctccactagaggctgaattccagagacttccttcatataggagctggaggacacagcacattggaaatcaagaagaaaataaaagtaaaaacaggaattctaatgtcatcccatatgactataacagagtgccacttaaacatgagctggaaatgagtaaagagagtgagcatgattcagatgaatcctctgatgatgacagtgattcagaggaaccaagcaaatacatcaatgcatcttttataatgagctactggaaacctgaagtgatgattgctgctcagggaccactgaaggagaccattggtgacttttggcagatgatcttccaaagaaaagtcaaagttattgttatgctgacagaactgaaacatggagaccaggaaatctgtgctcagtactggggagaaggaaagcaaacatatggagatattgaagttgacctgaaagacacagacaaatcttcaacttatacccttcgtgtctttgaactgagacattccaagaggaaagactctcgaactgtgtaccagtaccaatatacaaactggagtgtggagcagcttcctgcagaacccaaggaattaatctctatgattcaggtcgtcaaacaaaaacttccccagaagaattcctctgaagggaacaagcatcacaagagtacacctctactcattcactgcagggatggatctcagcaaacgggaatattttgtgctttgttaaatctcttagaaagtgcggaaacagaagaggtagtggatatttttcaagtggtaaaagctctacgcaaagctaggccaggcatggtttccacattcgagcaatatcaattcctatatgacgtcattgccagcacctaccctgctcagaatggacaagtaaagaaaaacaaccatcaagaagataaaattgaatttgataatgaagtggacaaagtaaagcaggatgctaattgtgttaatccacttggtgccccagaaaagctccctgaagcaaaggaacaggctgaaggttctgaacccacgagtggcactgaggggccagaacattctgtcaatggtcctgcaagtccagctttaaatcaaggttcataggaaaagacataaatgaggaaactccaaacctcctgttagctgttatttctatttttgtagaagtaggaagtgaaaataggtatacagtggattaattaaatgcagcgaaccaatatttgtagaagggttatattttactactgtggaaaaatatttaagatagttttgccagaacagtttgtacagacgtatgcttattttaaaattttatctcttattcagtaaaaaacaacttctttgtaatcgttatgtgtgtatatgtatgtgtgtatgggtgtgtgtttgtgtgagagacagagaaagagagagaattctttcaagtgaatctaaaagcttttgcttttcctttgtttttatgaagaaaaaatacattttatattagaagtgttaacttagcttgaaggatctgtttttaaaaatcataaactgtgtgcagactcaataaaatcatgtacatttctgaaatgacctcaagatgtcctccttgttctactcatatatatctatcttatatacttactattttacttctagagatagtacataaaggtggtatgtgtgtgtatgctactacaaaaaagttgttaactaaattaacattgggaaatcttatattccatatattagcatttagtccaatgtctttttaagcttatttaattaaaaaatttccagtgagcttatcatgctgtctttacatggggttttcaattttgcatgctcgattattccctgtacaatatttaaaatttattgcttgatacttttgacaacaaattaggttttgtacaattgaacttaaataaatgtcattaaaataaataaatgcaatatgtattaatattcattgtataaaaatagaagaatacaaacatatttgttaaatatttacatatgaaatttaatatagctatttttatggaatttttcattgatatgaaaaatatgatattgcatatgcatagttcccatgttaaatcccattcataactttcattaaagcatttactttgaatttc

SEQ ID NO: 3 - DNA, 4513 bp, Homo sapiens
  mRNA (1)..(4513): NM_014865.2| Homo sapiens chromosome condensation-related SMC-associated protein 1 (CNAP1)
ccacgcgtccgcagagccgcgggtgagatccccagccctgtgagcctgtaggagtagaatggctccccaaatgtatgagttccatctgccattatccccagaggagttgttgaaaagtggaggggtgaatcagtatgttgtgcaagaggtactgtccatcaaacatcttccaccacagcttagagcttttcaggctgcctttcgagctcaggggcccctggctatgctgcagcactttgatactatctacagcattttgcatcactttcgaagtatagatcctggcctcaaagaagatactctggaattcctgataaaagtggtatcccgccactcccaggagcttccagctatcctggatgatacaactttgagtggatcagatagaaacgcccatctaaatgccctcaaaatgaactgttatgctctgatacgtctcctggaatcctttgagaccatggccagccagacaaaccttgtggacctggaccttggtgggaagggtaagaaagctcggaccaaggcagcccatggctttgactgggaagaagagaggcaaccaattcttcagcttttaacacagctacttcagttggacatccgtcacctgtggaaccactcaataattgaagaagaatttgtcagtttggttactggctgttgctaccgccttctggagaatcccaccattaatcaccagaagaaccgccccactcgggaagccataacacacctgcttggtgtagccttgacccgttataaccatatgctcagtgctacagtgaagatcatccagatgctgcagcactttgaacacctggcacctgtactggttgcagccgtgagtctatgggcaactgactatggaatgaagagcatagtgggagagattgtaagagagattggacaaaagtgtccccaagagctgagtcgagacccttcagggacaaagggctttgcagcattcctgacagaactagcagaacgtgtcccagctatcctgatgtccagcatgtgcattttgctagatcacctggatggagaaaattacatgatgcgtaatgctgtgctggcagccatggcggagatggtgctgcaggttctcagtggcgatcaactggaagcagcagcccgagacaccagagaccagttcttggatactttacaagcccatggccatgatgtcaactcctttgtgcggagccgtgttttgcagctcttcacccgaattgtccagcagaaggctctccccctgacacgtttccaggcagtggtggctttagctgtgggacgtctggcagacaagtcagtgctagtatgtaaaaatgccatccagctgctggccagttttctagccaataatcctttctcctgcaagcttagtgatgctgaccttgccggaccactgcagaaggagacccagaaattacaagagatgagggcccagaggcgaactgcagcagcttctgcagtgctggacccagaggaggagtgggaagccatgctgccagagttgaagtctaccctgcagcagcttctacagcttccccagggagaggaggagattcctgagcaaattgccaatacagagacaactgaagatgtgaaaggacgcatctatcaactgcttgccaaagctagttacaaaaaggccatcattctcactcgagaagccacaggccacttccaggagtccgaacccttcagtcatatagacccagaggagtcagaggagaccaggctcttgaatatcttaggacttatcttcaaaggcccagcagcttccacacaagaaaagaatccccgggagtctacaggaaacatggtcacaggacagactgtctgtaaaaataaacccaatatgtcggatcctgaggaatccaggggaaatgatgaactagtgaagcaggagatgctggtacagtatctgcaggatgcctacagcttctcccggaagattacagaggccattggcataatcagcaagatgatgtatgaaaacacaactacagtggtgcaggaggtgattgaattctttgtgatggtcttccaatttggggtaccccaggccctgtttggggtgcgccgtatgctgcctctcatctggtctaaggagcctggtgtccgggaagccgtgcttaatgcctaccgccaactctacctcaaccccaaaggggactctgccagagccaaggcccaggctttgattcagaatctctctctgctgctagtggatgcctcggttgggaccattcagtgtcttgaggaaattctctgtgagtttgtgcagaaggatgagttgaaaccagcagtgacccagctgctgtgggagcgggccaccgagaaggtcgcctgctgtcctctggagcgctgttcctctgtcatgcttcttggcatgatggcacgaggaaagccagaaattgtgggaagcaatttagacacactggtgagcatagggctggatgagaagtttccacaggactacaggctggcccagcaggtgtgccatgccattgccaacatctcggacaggagaaagccttctctgggcaaacgtcacccccccttccggctgcctcaggaacacaggttgtttgagcgactgcgggagacagtcacaaaaggctttgtccacccagacccactctggatcccattcaaagaggtggcagtgaccctcatttaccaactggcagagggccccgaagtgatctgtgcccagatattgcagggctgtgcaaaacaggccctggagaagctagaagagaagagaaccagtcaggaggacccgaaggagtcccccgcaatgctccccactttcctgttgatgaacctgctgtccctggctggggatgtggctctgcagcagctggtccacttggagcaggcagtgagtggagagctctgccggcgccgagttctccgggaagaacaggagcacaagaccaaagatcccaaggagaagaatacgagctctgagaccaccatggaggaggagctggggctggttggggcaacagcagatgacacagaggcagaactaatccgtggcatctgcgagatggaactgttggatggcaaacagacactggctgcctttgttccactcttgcttaaagtctgtaacaacccaggcctctatagcaacccagacctctctgcagctgcttcacttgcccttggcaagttctgcatgatcagtgccactttctgcgactcccagcttcgtcttctgttcaccatgctggaaaagtctccacttcccattgtccggtctaacctcatggttgccactggggatctggccatccgctttcccaatctggtggacccctggactcctcatctgtatgctcgcctccgggaccctgctcagcaagtgcggaaaacagcggggctggtgatgacccacctgatcctcaaggacatggtgaaggtgaaggggcaggtcagcgagatggcggtgctgctcatcgaccccgagcctcagattgctgccctggccaagaacttcttcaatgagctctcccacaagggcaacgcaatctataatctccttccagatatcatcagccgcctgtcagaccccgagctgggggtggaggaagagcctttccacaccatcatgaaacagctcctctcctacatcaccaaggacaagcagacagagagcctggtggaaaagctgtgtcagcggttccgcacatcccgaactgagcggcagcagcgagacctggcctactgtgtgtcacagctgcccctcacagagcgaggcctccgtaagatgcttgacaattttgactgttttggagacaaactgtcagatgagtccatcttcagtgcttttttgtcagttgtgggcaagctgcgacgtggggccaagcctgagggcaaggctataatagatgaatttgagcagaagcttcgggcctgtcataccagaggtttggatggaatcaaggagcttgagattggccaagcaggtagccagagagcgccatcagccaagaaaccatccagtggttctaggtaccagcctctggcttctacagcctcagacaatgactttgtcacaccagagccccgccgtactacccgtcggcatccaaacacccagcagcgagcttccaaaaagaaacccaaagttgtcttctcaagtgatgagtccagtgaggaagatctttcagcagagatgacagaagacgagacacccaagaaaacaactcccattctcagagcatcggctcgcaggcacagatcctaggaagtctgttcctgtcctccctgtgcagggtatcctgtagggtgacctggaattcgaattctgtttcccttgtaaaatatttgtctgtctctttttttaaaaaaaaaaaaaaaaggccgggcactgtggctcacgcctgtaatcccagcactttgcgataccaaggcgggtggataacctgaggtagggagttcgagaccagcctgaccaacatggagaaaccccatctctactaaaaaaaaaaaaaaa

SEQ ID NO: 4 - DNA, 5681 bp, Homo sapiens
  mRNA (1)..(5681): NM_003072.2| Homo sapiens SWI/SNF related, matrix associated, actin dependent regulator of chromatin, subfamily a, member 4 (SMARCA4)
cgccgcggtgctgagggggaggggagccggcgagcgcgcgcgcagcgggggcgcgggtggcgcgcgtgtgtgtgaagggggggcggtggccgaggcgggcgggcgcgcgcgcgaggcttcccctcgtttggcggcggcggcggcttctttgtttcgtgaagagaagcgagacgcccattctgcccccggccccgcgcggaggggcgggggaggcgccgggaagtcgacggcgccggcggctcctgcaggaggccactgtctgcagctcccgtgaagatgtccactccagacccacccctgggcggaactcctcggccaggtccttccccgggccctggcccttcccctggagccatgctgggccctagcccgggtccctcgccgggctccgcccacagcatgatggggcccagcccagggccgccctcagcaggacaccccatccccacccaggggcctggagggtaccctcaggacaacatgcaccagatgcacaagcccatggagtccatgcatgagaagggcatgtcggacgacccgcgctacaaccagatgaaaggaatggggatgcggtcagggggccatgctgggatggggcccccgcccagccccatggaccagcactcccaaggttacccctcgcccctgggtggctctgagcatgcctctagtccagttccagccagtggcccgtcttcggggccccagatgtcttccgggccaggaggtgccccgctggatggtgctgacccccaggccttggggcagcagaaccggggcccaaccccatttaaccagaaccagctgcaccagctcagagctcagatcatggcctacaagatgctggccagggggcagcccctccccgaccacctgcagatggcggtgcagggcaagcggccgatgcccgggatgcagcagcagatgccaacgctacctccaccctcggtgtccgcaacaggacccggccctggccctggccctggccccggcccgggtcccggcccggcacctccaaattacagcaggcctcatggtatgggagggcccaacatgcctcccccaggaccctcgggcgtgccccccgggatgccaggccagcctcctggagggcctcccaagccctggcctgaaggacccatggcgaatgctgctgcccccacgagcacccctcagaagctgattcccccgcagccaacgggccgcccttcccccgcgccccctgccgtcccacccgccgcctcgcccgtgatgccaccgcagacccagtcccccgggcagccggcccagcccgcgcccatggtgccactgcaccagaagcagagccgcatcacccccatccagaagccgcggggcctcgaccctgtggagatcctgcaggagcgcgagtacaggctgcaggctcgcatcgcacaccgaattcaggaacttgaaaaccttcccgggtccctggccggggatttgcgaaccaaagcgaccattgagctcaaggccctcaggctgctgaacttccagaggcagctgcgccaggaggtggtggtgtgcatgcggagggacacagcgctggagacagccctcaatgctaaggcctacaagcgcagcaagcgccagtccctgcgcgaggcccgcatcactgagaagctggagaagcagcagaagatcgagcaggagcgcaagcgccggcagaagcaccaggaatacctcaatagcattctccagcatgccaaggatttcaaggaatatcacagatccgtcacaggcaaaatccagaagctgaccaaggcagtggccacgtaccatgccaacacggagcgggagcagaagaaagagaacgagcggatcgagaaggagcgcatgcggaggctcatggctgaagatgaggaggggtaccgcaagctcatcgaccagaagaaggacaagcgcctggcctacctcttgcagcagacagacgagtacgtggctaacctcacggagctggtgcggcagcacaaggctgcccaggtcgccaaggagaaaaagaagaaaaagaaaaagaagaaggcagaaaatgcagaaggacagacgcctgccattgggccggatggcgagcctctggacgagaccagccagatgagcgacctcccggtgaaggtgatccacgtggagagtgggaagatcctcacaggcacagatgcccccaaagccgggcagctggaggcctggctcgagatgaacccggggtatgaagtagctccgaggtctgatagtgaagaaagtggctcagaagaagaggaagaggaggaggaggaagagcagccgcaggcagcacagcctcccaccctgcccgtggaggagaagaagaagattccagatccagacagcgatgacgtctctgaggtggacgcgcggcacatcattgagaatgccaagcaagatgtcgatgatgaatatggcgtgtcccaggcccttgcacgtggcctgcagtcctactatgccgtggcccatgctgtcactgagagagtggacaagcagtcagcgcttatggtcaatggtgtcctcaaacagtaccagatcaaaggtttggagtggctggtgtccctgtacaacaacaacctgaacggcatcctggccgacgagatgggcctggggaagaccatccagaccatcgcgctcatcacgtacctcatggagcacaaacgcatcaatgggcccttcctcatcatcgtgcctctctcaacgctgtccaactgggcgtacgagtttgacaagtgggccccctccgtggtgaaggtgtcttacaagggatccccagcagcaagacgggcctttgtcccccagctccggagtgggaagttcaacgtcttgctgacgacgtacgagtacatcatcaaagacaagcacatcctcgccaagatccgttggaagtacatgattgtggacgaaggtcaccgcatgaagaaccaccactgcaagctgacgcaggtgctcaacacgcactatgtggcaccccgccgcctgctgctgacgggcacaccgctgcagaacaagcttcccgagctctgggcgctgctcaacttcctgctgcccaccatcttcaagagctgcagcaccttcgagcagtggtttaacgcaccctttgccatgaccggggaaaaggtggacctgaatgaggaggaaaccattctcatcatccggcgtctccacaaagtgctgcggcccttcttgctccgacgactcaagaaggaagtcgaggcccagttgcccgaaaaggtggagtacgtcatcaagtgcgacatgtctgcgctgcagcgagtgctctaccgccacatgcaggccaagggcgtgctgctgactgatggctccgagaaggacaagaagggcaaaggcggcaccaagaccctgatgaacaccatcatgcagctgcggaagatctgcaaccacccctacatgttccagcacatcgaggagtccttttccgagcacttggggttcactggcggcattgtccaagggctggacctgtaccgagcctcgggtaaatttgagcttcttgatagaattcttcccaaactccgagcaaccaaccacaaagtgctgctgttctgccaaatgacctccctcatgaccatcatggaagattactttgcgtatcgcggctttaaatacctcaggcttgatggaaccacgaaggcggaggaccggggcatgctgctgaaaaccttcaacgagcccggctctgagtacttcatcttcctgctcagcacccgggctggggggctcggcctgaacctccagtcggcagacactgtgatcatttttgacagcgactggaatcctcaccaggacctgcaagcgcaggaccgagcccaccgcatcgggcagcagaacgaggtgcgtgtgctccgcctctgcaccgtcaacagcgtggaggagaagatcctagctgcagccaagtacaagctcaacgtggaccagaaggtgatccaggccggcatgttcgaccagaagtcctccagccatgagcggcgcgccttcctgcaggccatcctggagcacgaggagcaggatgagagcagacactgcagcacgggcagcggcagtgccagcttcgcccacactgcccctccgccagcgggcgtcaaccccgacttggaggagccacctctaaaggaggaagacgaggtgcccgacgacgagaccgtcaaccagatgatcgcccggcacgaggaggagtttgatctgttcatgcgcatggacctggaccgcaggcgcgaggaggcccgcaaccccaagcggaagccgcgcctcatggaggaggacgagctcccctcgtggatcatcaaggacgacgcggaggtggagcggctgacctgtgaggaggaggaggagaagatgttcggccgtggctcccgccaccgcaaggaggtggactacagcgactcactgacggagaagcagtggctcaaggccatcgaggagggcacgctggaggagatcgaagaggaggtccggcagaagaaatcatcacggaagcgcaagcgagacagcgacgccggctcctccaccccgaccaccagcacccgcagccgcgacaaggacgacgagagcaagaagcagaagaagcgcgggcggccgcctgccgagaaactctcccctaacccacccaacctcaccaagaagatgaagaagattgtggatgccgtgatcaagtacaaggacagcagcagtggacgtcagctcagcgaggtcttcatccagctgccctcgcgaaaggagctgcccgagtactacgagctcatccgcaagcccgtggacttcaagaagataaaggagcgcattcgcaaccacaagtaccgcagcctcaacgacctagagaaggacgtcatgctcctgtgccagaacgcacagaccttcaacctggagggctccctgatctatgaagactccatcgtcttgcagtcggtcttcaccagcgtgcggcagaaaatcgagaaggaggatgacagtgaaggcgaggagagtgaggaggaggaagagggcgaggaggaaggctccgaatccgaatctcggtccgtcaaagtgaagatcaagcttggccggaaggagaaggcacaggaccggctgaagggcggccggcggcggccgagccgagggtcccgagccaagccggtcgtgagtgacgatgacagtgaggaggaacaagaggaggaccgctcaggaagtggcagcgaagaagactgagccccgacattccagtctcgaccccgagcccctcgttccagagctgagatggcataggccttagcagtaacgggtagcagcagatgtagtttcagacttggagtaaaactgtataaacaaaagaatcttccatatttatacagcagagaagctgtaggactgtttgtgactggccctgtcctggcatcagtagcatctgtaacagcattaactgtcttaaagagagagagagagaattccgaattggggaacacacgatacctgtttttcttttccgttgctggcagtactgttgcgccgcagtttggagtcactgtagttaagtgtggatgcatgtgcgtcaccgtccactcctcctactgtattttattggacaggtcagactcgccgggggcccggcgagggtatgtcagtgtcactggatgtcaaacagtaataaattaaaccaacaacaaaacgca

SEQ ID NO: 5 - DNA, 8481 bp, Homo sapiens
  mRNA (1)..(8481): NM_004104.4| Homo sapiens fatty acid synthase (FASN)
gagagacggcagcggccccggcctccctctccgccgcgcttcagcctcccgctccgccgcgctccagcctcgctctccgccgcccgcaccgccgcccgcgccctcaccagagcagccatggaggaggtggtgattgccggcatgtccgggaagctgccagagtcggagaacttgcaggagttctgggacaacctcatcggcggtgtggacatggtcacggacgatgaccgtcgctggaaggcggggctctacggcctgccccggcggtccggcaagctgaaggacctgtctaggtttgatgcctccttcttcggagtccaccccaagcaggcacacacgatggaccctcagctgcggctgctgctggaagtcacctatgaagccatcgtggacggaggcatcaacccagattcactccgaggaacacacactggcgtctgggtgggcgtgagcggctctgagacctcggaggccctgagccgagaccccgagacactcgtgggctacagcatggtgggctgccagcgagcgatgatggccaaccggctctccttcttcttcgacttcagagggcccagcatcgcactggacacagcctgctcctccagcctgatggccctgcagaacgcctaccaggccatccacagcgggcagtgccctgccgccatcgtggggggcatcaatgtcctgctgaagcccaacacctccgtgcagttcttgaggctggggatgctcagccccgagggcacctgcaaggccttcgacacagcggggaatgggtactgccgctcggagggtgtggtggccgtcctgctgaccaagaagtccctggcccggcgggtgtacgccaccatcctgaacgccggcaccaatacagatggcttcaaggagcaaggcgtgaccttcccctcaggggatatccaggagcagctcatccgctcgttgtaccagtcggccggagtggcccctgagtcatttgaatacatcgaagcccacggcacaggcaccaaggtgggcgacccccaggagctgaatggcatcacccgagccctgtgcgccacccgccaggagccgctgctcatcggctccaccaagtccaacatggggcacccggagccagcctcggggctggcagccctggccaaggtgctgctgtccctggagcacgggctctgggcccccaacctgcacttccatagccccaaccctgagatcccagcgctgttggatgggcggctgcaggtggtggaccagcccctgcccgtccgtggcggcaacgtgggcatcaactcctttggcttcgggggctccaacgtgcacatcatcctgaggcccaacacgcagccgccccccgcacccgccccacatgccaccctgccccgtctgctgcgggccagcggacgcacccctgaggccgtgcagaagctgctggagcagggcctccggcacagccaggacctggctttcctgagcatgctgaacgacatcgcggctgtccccgccaccgccatgcccttccgtggctacgctgtgctgggtggtgagcgcggtggcccagaggtgcagcaggtgcccgctggcgagcgcccgctctggttcatctgctctgggatgggcacacagtggcgcgggatggggctgagcctcatgcgcctggaccgcttccgagattccatcctacgctccgatgaggctgtgaagccattcggcctgaaggtgtcacagctgctgctgagcacagacgagagcacctttgatgacatcgtccattcgtttgtgagcctgactgccatccagataggcctcatagacctgctgagctgcatggggctgaggccagatggcatcgtcggccactccctgggggaggtggcctgtggctacgccgacggctgcctgtcccaggaggaggccgtcctcgctgcctactggaggggacagtgcatcaaagaagcccatctcccgccgggcgccatggcagccgtgggcttgtcctgggaggagtgtaaacagcgctgccccccgggcgtggtgcccgcctgccacaactccaaggacacagtcaccatctcgggacctcaggccccggtgtttgagttcgtggagcagctgaggaaggagggtgtgtttgccaaggaggtgcggaccggcggtatggccttccactcctacttcatggaggccatcgcacccccactgctgcaggagctcaagaaggtgatccgggagccgaagccacgttcagcccgctggctcagcacctctatccccgaggcccagtggcacagcagcctggcacgcacgtcctccgccgagtacaatgtcaacaacctggtgagccctgtgctgttccaggaggccctgtggcacgtgcctgagcacgcggtggtgctggagatcgcgccccacgccctgctgcaggctgtcctgaagcgtggcctgaagccgagctgcaccatcatccccctgatgaagaaggatcacagggacaacctggagttcttcctggccggcatcggcaggctgcacctctcaggcatcgacgccaaccccaatgccttgttcccacctgtggagttcccagctccccgaggaactcccctcatctccccactcatcaagtgggaccacagcctggcctgggacgtgccggccgccgaggacttccccaacggttcaggttccccctcagccgccatctacaacatcgacaccagctccgagtctcctgaccactacctggtggaccacaccctcgacggtcgcgtcctcttccccgccactggctacctgagcatagtgtggaagacgctggcccgcgccctgggcctgggcgtcgagcagctgcctgtggtgtttgaggatgtggtgctgcaccaggccaccatcctgcccaagactgggacagtgtccctggaggtacggctcctggaggcctcccgtgccttcgaggtgtcagagaacggcaacctggtagtgagtgggaaggtgtaccagtgggatgaccctgaccccaggctcttcgaccacccggaaagccccacccccaaccccacggagcccctcttcctggcccaggctgaagtttacaaggagctgcgtctgcgtggctacgactacggccctcatttccagggcatcctggaggccagcctggaaggtgactcggggaggctgctgtggaaggataactgggtgagcttcatggacaccatgctgcagatgtccatcctgggctcggccaagcacggcctgtacctgcccacccgtgtcaccgccatccacatcgaccctgccacccacaggcagaagctgtacacactgcaggacaaggcccaagtggctgacgtggtggtgagcaggtggctgagggtcacagtggccggaggcgtccacatctccgggctccacactgagtcggccccgcggcggcagcaggagcagcaggtgcccatcctggagaagttttgcttcactccccacacggaggaggggtgcctgtctgagcgcgctgccctgcaggaggagctgcaactgtgcaaggggctggtgcaggcactgcagaccaaggtgacccagcaggggctgaagatggtggtgcccggactggatggggcccagatcccccgggacccctcacagcaggaactgccccggctgttgtcggctgcctgcaggcttcagctcaacgggaacctgcagctggagctggcgcaggtgctggcccaggagaggcccaagctgccagaggaccctctgctcagcggcctcctggactccccggcactcaaggcctgcctggacactgccgtggagaacatgcccagcctgaagatgaaggtggtggaggtgctggctggccacggtcacctgtattcccgcatcccaggcctgctcagcccccatcccctgctgcagctgagctacacggccaccgaccgccacccccaggccctggaggctgcccaggccgagctgcagcagcacgacgttgcccagggccagtgggatcccgcagaccctgcccccagcgccctgggcagcgccgacctcctggtgtgcaactgtgctgtggctgccctcggggacccggcctcagctctcagcaacatggtggctgccctgagagaagggggctttctgctcctgcacacactgctccgggggcaccccctcggggacatcgtggccttcctcacctccactgagccgcagtatggccagggcatcctgagccaggacgcgtgggagagcctcttctccagggtgtcgctgcgcctggtgggcctgaagaagtccttctacggctccacgctcttcctgtgccgccggcccaccccgcaggacagccccatcttcctgccggtggacgataccagcttccgctgggtggagtctctgaagggcatcctggctgacgaagactcttcccggcctgtgtggctgaaggccatcaactgtgccacctcgggcgtggtgggcttggtgaactgtctccgccgagagcccggcgggaaccgcctccggtgtgtgctgctctccaacctcagcagcacctcccacgtcccggaggtggacccgggctccgcagaactgcagaaggtgttgcagggagacctggtgatgaacgtctaccgcgacggggcctggggggctttccgccacttcctgctggaggaggacaagcctgaggagccgacggcacatgcctttgtgagcaccctcacccggggggacctgtcctccatccgctgggtctgctcctcgctgcgccatgcccagcccacctgccctggcgcccagctctgcacggtctactacgcctccctcaacttccgcgacatcatgctggccactggcaagctgtcccctgatgccatcccagggaagtggacctcccaggacagcctgctaggtatggagttctcgggccgagacgccagcggcaagcgtgtgatgggactggtgcctgccaagggcctggccacctctgtcctgctgtcaccggacttcctctgggatgtgccttccaactggacgctggaggaggcggcctcggtgcctgtcgtctacagcacggcctactacgcgctggtggtgcgtgggcgggtgcgccccggggagacgctgctcatccactcgggctcgggcggcgtgggccaggccgccatcgccatcgccctcagtctgggctgccgcgtcttcaccaccgtggggtcggctgagaagcgggcgtacctccaggccaggttcccccagctcgacagcaccagcttcgccaactcccgggacacatccttcgagcagcatgtgctgtggcacacgggcgggaagggcgttgacctggtcttgaactccttggcggaagagaagctgcaggccagcgtgaggtgcttggctacgcacggtcgcttcctggaaattggcaaattcgacctttctcagaaccacccgctcggcatggctatcttcctgaagaacgtgacattccacggggtcctactggatgcgttcttcaacgagagcagtgctgactggcgggaggtgtgggcgcttgtgcaggccggcatccgggatggggtggtacggcccctcaagtgcacggtgttccatggggcccaggtggaggacgccttccgctacatggcccaagggaagcacattggcaaagtcgtcgtgcaggtgcttgcggaggagccggaggcagtgctgaagggggccaaacccaagctgatgtcggccatctccaagaccttctgcccggcccacaagagctacatcatcgctggtggtctgggtggcttcggcctggagttggcgcagtggctgatacagcgtggggtgcagaagctcgtgttgacttctcgctccgggatccggacaggctaccaggccaagcaggtccgccggtggaggcgccagggcgtacaggtgcaggtgtccaccagcaacatcagctcactggagggggcccggggcctcattgccgaggcggcgcagcttgggcccgtgggcggcgtcttcaacctggccgtggtcttgagagatggcttgctggagaaccagaccccagagttcttccaggacgtctgcaagcccaagtacagcggcaccctgaacctggacagggtgacccgagaggcgtgccctgagctggactactttgtggtcttctcctctgtgagctgcgggcgtggcaatgcgggacagagcaactacggctttgccaattccgccatggagcgtatctgtgagaaacgccggcacgaaggcctcccaggcctggccgtgcagtggggcgccatcggcgacgtgggcattttggtggagacgatgagcaccaacgacacgatcgtcagtggcacgctgccccagcgcatggcgtcctgcctggaggtgctggacctcttcctgaaccagccccacatggtcctgagcagctttgtgctggctgagaaggctgcggcctatagggacagggacagccagcgggacctggtggaggccgtggcacacatcctgggcatccgcgacttggctgctgtcaacctggacagctcactggcggacctgggcctggactcgctcatgagcgtggaggtgcgccagacgctggagcgtgagctcaacctggtgctgtccgtgcgcgaggtgcggcaactcacgctccggaaactgcaggagctgtcctcaaaggcggatgaggccagcgagctggcatgccccacgcccaaggaggatggtctggcccagcagcagactcagctgaacctgcgctccctgctggtgaacccggagggccccaccctgatgcggctcaactccgtgcagagctcggagcggcccctgttcctggtgcacccaatcgagggctccaccaccgtgttccacagcctggcctcccggctcagcatccccacctatggcctgcagtgcacccgagctgcgccccttgacagcatccacagcctggctgcctactacatcgactgcatcaggcaggtgcagcccgagggcccctaccgcgtggccggctactcctacggggcctgcgtggcctttgaaatgtgctcccagctgcaggcccagcagagcccagcccccacccacaacagcctcttcctgttcgacggctcgcccacctacgtactggcctacacccagagctaccgggcaaagctgaccccaggctgtgaggctgaggctgagacggaggccatatgcttcttcgtgcagcagttcacggacatggagcacaacagggtgctggaggcgctgctgccgctgaagggcctagaggagcgtgtggcagccgccgtggacctgatcatcaagagccaccagggcctggaccgccaggagctgagctttgcggcccggtccttctactacaagctgcgtgccgctgagcagtacacacccaaggccaagtaccatggcaacgtgatgctactgcgcgccaagacgggtggcgcctacggcgaggacctgggcgcggactacaacctctcccaggtatgcgacgggaaagtatccgtccacgtcatcgagggtgaccaccgcacgctgctggagggcagcggcctggagtccatcatcagcatcatccacagctccctggctgagccacgcgtgagcgtgcgggagggctaggcccgtgcccccgcctgccaccggaggtcactccaccatccccaccccaccccaccccacccccgccatgcaacgggattgaagggtcctgccggtgggaccctgtccggcccagtgccactgccccccgaggctgctagatgtaggtgttaggcatgtcccacccacccgccgcctcccacggcacctcggggacaccagagctgccgacttggagactcctggtctgtgaagagccggtggtgcccgtgcccgcaggaactgggctgggcctcgtgcgcccgtggggtctgcgcttggtctttctgtgcttggatttgcatatttattgcattgctggtagagacccccaggcctgtccaccctgccaagactcctcaggcagcgtgtgggtcccgcactctgcccccatttccccgatgtcccctgcgggcgcgggcagccacccaagcctgctggctgcggccccctctcggccaggcattggctcagcccgctgagtggggggtcgtgggccagtccccgaggagctgggcccctgcacaggcacacagggcccggccacacccagcggccccccgcacagccacccgtggggtgctgcccttatgcccggcgccgggcaccaactccatgtttggtgtttgtctgtgtttgtttttcaagaaatgattcaaattgctgcttggattttgaaatttactgtaactgtcagtgtacacgtctggaccccgtttcatttttacaccaatttggtaaaaatgctgctctcagcctcccacaattaaaccgcatgtgatctccaaaaaaaaaaaaaaaaaaaaaaaa

SEQ ID NO: 6 - DNA, 2795 bp, Homo sapiens
  mRNA (1)..(2795): NM_004990.2| Homo sapiens methionine-tRNA synthetase (MARS)
atcagcgagggattcacggcgaaatgagactgttcgtgagtgatggcgtcccgggttgcttgccggtgctggccgccgccgggagagcccggggcagagcagaggtgctcatcagcactgtaggcccggaagattgtgtggtcccgttcctgacccggcctaaggtccctgtcttgcagctggatagcggcaactacctcttctccactagtgcaatctgccgatatttttttttgttatctggctgggagcaagatgacctcactaaccagtggctggaatgggaagcgacagagctgcagccagctttgtctgctgccctgtactatttagtggtccaaggcaagaagggggaagatgttcttggttcagtgcggagagccctgactcacattgaccacagcttgagtcgtcagaactgtcctttcctggctggggagacagaatctctagccgacattgttttgtggggagccctatacccattactgcaagatcccgcctacctccctgaggagctgagtgccctgcacagctggttccagacactgagtacccaggaaccatgtcagcgagctgcagagactgtactgaaacagcaaggtgtcctggctctccggccttacctccaaaagcagccccagcccagccccgctgagggaagggctgtcaccaatgagcctgaggaggaggagctggctaccctatctgaggaggagattgctatggctgttactgcttgggagaagggcctagaaagtttgcccccgctgcggccccagcagaatccagtgttgcctgtggctggagaaaggaatgtgctcatcaccagtgccctcccttacgtcaacaatgtcccccaccttgggaacatcattggttgtgtgctcagtgccgatgtctttgccaggtactctcgcctccgccagtggaacaccctctatctgtgtgggacagatgagtatggtacagcaacagagaccaaggctctggaggagggactaaccccccaggagatctgcgacaagtaccacatcatccatgctgacatctaccgctggtttaacatttcgtttgatatttttggtcgcaccaccactccacagcagaccaaaatcacccaggacattttccagcagttgctgaaacgaggttttgtgctgcaagatactgtggagcaactgcgatgtgagcactgtgctcgcttcctggctgaccgcttcgtggagggcgtgtgtcccttctgtggctatgaggaggctcggggtgaccagtgtgacaagtgtggcaagctcatcaatgctgtcgagcttaagaagcctcagtgtaaagtctgccgatcatgccctgtggtgcagtcgagccagcacctgtttctggacctgcctaagctggagaagcgactggaggagtggttggggaggacattgcctggcagtgactggacacccaatgcccagtttatcacccgttcttggcttcgggatggcctcaagccacgctgcataacccgagacctcaaatggggaacccctgtacccttagaaggttttgaagacaaggtattctatgtctggtttgatgccactattggctatctgtccatcacagccaactacacagaccagtgggagagatggtggaagaacccagagcaagtggacctgtatcagttcatggccaaagacaatgttcctttccatagcttagtctttccttgctcagccctaggagctgaggataactataccttggtcagccacctcattgctacagagtacctgaactatgaggatgggaaattctctaagagccgcggtgtgggagtgtttggggacatggcccaggacacggggatccctgctgacatctggcgcttctatctgctgtacattcggcctgagggccaggacagtgctttctcctggacggacctgctgctgaagaataattctgagctgcttaacaacctgggcaacttcatcaacagagctgggatgtttgtgtctaagttctttgggggctatgtgcctgagatggtgctcacccctgatgatcagcgcctgctggcccatgtcaccctggagctccagcactatcaccagctacttgagaaggttcggatccgggatgccttgcgcagtatcctcaccatatctcgacatggcaaccaatatattcaggtgaatgagccctggaagcggattaaaggcagtgaggctgacaggcaacgggcaggaacagtgactggcttggcagtgaatatagctgccttgctctctgtcatgcttcagccttacatgcccacggttagtgccacaatccaggcccagctgcagctcccacctccagcctgcagtatcctgctgacaaacttcctgtgtaccttaccagcaggacaccagattggcacagtcagtcccttgttccaaaaattggaaaatgaccagattgaaagtttaaggcagcgctttggagggggccaggcaaaaacgtccccgaagccagcagttgtagagactgttacaacagccaagccacagcagatacaagcgctgatggatgaagtgacaaaacaaggaaacattgtccgagaactgaaagcacaaaaggcagacaagaacgaggttgctgcggaggtggcgaaactcttggatctaaagaaacagttggctgtagctgaggggaaaccccctgaagcccctaaaggcaagaagaaaaagtaaaagaccttggctcatagaaagtcactttaatagatagggacagtaataaataaatgtacaatctctata

SEQ ID NO: 7 - DNA, 4325 bp, Homo sapiens
  mRNA (1)..(4325): NM_004599.2| Homo sapiens sterol regulatory element binding transcription factor 2 (SREBF2)
gccctttctgtgcggcgcccgggcgcaacgcaaacatggcggcgggtggcacccgtcggtgaggcggtgccgggcgggggttgtcgggtgtcatgggcggtggcgacggcaccgcccccgcgtctccctgagcgggacggcagggggggcttctgcgctgagccgggcgatggacgacagcggcgagctgggtggtctggagaccatggagaccctcacggagctgggcgacgagctgaccctgggagacatcgacgagatgctgcaatttgtcagtaatcaagtgggagagttccctgacttgttttcagaacagctgtgtagctcctttcctggcagtggtggtagtggtagcagcagcggcagcagtggcagcagcagcagcagcagcaatggcaggggcagcagcagcggagctgtggacccttcagtgcaacggtcattcacccaggtcacattaccttccttctctccctcggcggcctccccacaggctccaactctgcaagtcaaggtttctcccacctcagttcccaccacacccagggcaactcctattcttcagccccgcccccagccccagcctcaacctcaaactcagctgcaacaacagacggtaatgatcacgccaacattcagcaccactccgcagacgaggatcatccagcagcctttgatataccagaatgcagctactagctttcaagtccttcagcctcaagtccaaagcctggtgacatcctcccaggtacagccggtcaccattcagcagcaggtgcagacagtacaggcccagcgggtgctgacacaaacggccaatggcacgctgcagacccttgccccggctacggtgcagacagttgctgcgccacaggtgcagcaggtcccggtcctggtccagcctcagatcatcaagacagattcccttgttttgaccacactgaagacagatggcagccctgttatggctgcggtccagaacccggccctcaccgccctcaccacccctatccagacggctgcccttcaagtaccaaccctggtgggcagcagtgggaccattctgaccacaatgcctgtaatgatggggcaagagaaagtgcccattaagcaggtacctgggggagtcaagcagcttgagccccccaaagaaggagaaaggcggacaacccataatatcattgagaaacgatatcgctcctccatcaatgacaaaatcatcgaattgaaagacctggtcatggggacagacgccaagatgcacaagtctggcgttctgaggaaggccattgattacatcaaatacttgcagcaggtcaatcataaactgcgccaggagaacatggtgctgaagctggcaaatcaaaagaacaagcttctaaagggcatcgacctaggcagtctggtggacaatgaggtggacctgaagatcgaggactttaatcagaatgtccttctgatgtcccccccagcctctgactcagggtcccaggctggcttctctccctactccattgactctgagccaggaagccctctattggatgatgcaaaggtcaaagatgagccagactctcctcctgtggcgctgggcatggtagaccgctcacggattcttctgtgtgtcctcaccttcctgtgcctctcctttaaccccctgacttccctgctgcagtggggaggggcccacgactctgaccagcacccacactcaggctctggccgcagtgtcctgtcattcgagtcaggttctgggggctggtttgactggatgatgcctactcttctcttatggctggtaaatggtgtgattgtcctgagcgtctttgtgaagctgctggttcatggggagccagtgatccggccacactcgcgctcctcggtcaccttctggaggcaccggaaacaggcagatctggatctcgccagaggagattttgcagctgctgccggcaacctacaaacctgcctggcagttttgggccgggcactgcccacctcccgcctggacctggcctgcagcctctcctggaacgtgatccgctacagcctgcagaagctacgcctggtgcgctggctgctcaagaaagtcttccagtgccggcgggccacgccagccactgaggcaggctttgaagacgaagctaagaccagcgcccgggatgcggctctggcctatcaccggctgcaccagctgcacatcacagggaagcttcctgcaggatccgcctgttccgatgtacacatggcgttgtgtgccgtgaacctggctgaatgtgcagaggagaagatcccaccgagcacactggttgagatccatctgactgctgccatggggctcaagacccggtgtggaggcaagctgggcttcctggccagctacttcctcagccgagcccagagcctgtgtggccccgagcacagtgctgttcctgactccctgcgctggctctgccaccccctgggccagaagtttttcatggagcggagctggtctgtgaagtcagctgccaaggagagtctatactgtgcccagaggaacccagctgaccccattgcgcaggtccaccaggccttctgcaagaacctgctggagcgagctatagagtccttggtgaaacctcaggccaagaagaaggctggagaccaggaagaagagagctgtgaattctccagtgctctggagtacttgaaattacttcattcttttgtggactctgtgggggttatgagccccccactctccaggagctccgtgctcaagtccgccctgggtccagacatcatctgtcggtggtggacgtctgcaatcactgtggccatcagctggctccagggagacgatgcagctgtgcgctctcattttaccaaagtggaacgcatccccaaggccctggaagtgacagagagccccctggtgaaggccatcttccatgcctgcagagccatgcatgcctcactccctgggaaagcagatgggcagcagagttccttctgccattgcgagagggccagtggccacctatggagcagcctcaacgtcagtggggccacctctgaccctgccctcaaccacgtggtccagctgctcacctgtgacctgctactgtcgctacggacagcgctctggcaaaaacaggccagtgccagccaggctgtgggggagacctaccacgcgtcaggcgctgaactggcgggcttccaacgggacctgggcagcctgcgcaggctggcacacagcttccgcccagcataccgcaaggtgttcctgcatgaagccaccgtgcgcctgatggcaggagccagccccacccgcacccaccagctgctggaacacagcctgcggcggcgcaccacgcagagcaccaagcacggagaggtggatgcctggcccggccagcgagagcgggccaccgccatcctgctggcctgccgccacctgcccctctccttcctctcctccccgggccagcgggcagtgctgctggccgaagctgcccgcaccctggagaaggtgggcgaccggcgctcctgcaacgactgccagcagatgattgttaagctgggtggtggcactgccattgccgcctcctgaccaccaggctcagcccacccctccacctctctctcgatttctctctctccccctcagcatcttcccgctgagagtggtggggaagagccttgtcttcttagctgtcacctgccgaggcttctgggccactcaggccagtgcacccctgggcagagccccttaaagctgctgtcactagatgcccatggtccagggcctggtgggcgtgagaggataggtggcagggcagaaactgggcagccctgacttgatagcagcagggggagctcccaagctgccaagcccctgcctccagccttcctgagtttctctctcctgaaccctactctctcctttttgcttcctcagtttttatcaggctttctctgggggacagcagtctctgagcaccagggagcagttgccctcaggcctgtgcccagcatgccctcccctttttatacgaatgttttctaccagtgtgcttgggtttgccatgatgcgaggctgagttgctgtagcgtcttgattctctccctgggtctgcgttccctcccctgggcctgactgagcctgctcattgtttttccctttattacacaggacagccaggggaggaggggggcccagccctgggaggctggtgggaggcagggggcaggcctgcggatgcatgaaataatgttggcattattttttaattttttaaaaaataaatggtatcttatttaaaaaaaaaaaaaaaaaaaaa

SEQ ID NO: 8 - DNA, 4508 bp, Homo sapiens
  mRNA (1)..(4508): NM_013417.1| Homo sapiens isoleucine-tRNA synthetase (IARS), transcript variant long
cgggcagcgtggaccccggatgagttgcttttaggcttgctggcccgcggggctgtccaggcacgcgaggcccctcaggtacgccctctcttccctgcaggatccggccctcaaagacgagggtcacgcacgcgttacaaccccgaaacagtagcacaagatttaatttttaaaagagcgtgtttcttcggggcttgccgttcgttcgtttccagcctcaggaatttatggtcgcctttttgaatgagcaacaaaatgcttcaacaagttccagaaaacataaattttcctgctgaagaagagaaaatcttggagttttggactgaatttaattgttttcaggaatgcttaaagcaatcaaaacataaaccaaaatttaccttctatgatggtcctccttttgcaactggactgcctcactatggacatatacttgcgggtacaattaaagatatagttacaagatatgctcaccagagtgggtttcatgttgacagaagatttggatgggattgccatggcttacctgtggaatatgaaattgataagacactgggaatcagaggaccagaggatgtggccaaaatggggattacagagtataacaatcagtgccgagcaattgtgatgagatattctgctgagtggaagtctactgttagcagacttggccgatggattgactttgacaatgactataaaactctgtatccacaattcatggaatcagtctggtgggtcttcaaacaactctatgataaaggccttgtttatagaggtgtgaaagtcatgcccttctctacggcatgtaacactccactttccaacttcgagtcacaccagaattataaggatgttcaagatccttcagtatttgtaactttccctttggaagaagatgaaactgtatctttagttgcttggacaaccactccctggactctacctagtaaccttgctgtgtgtgttaatccagaaatgcaatatgtgaaaattaaagatgttgccagaggacgattactcattttaatggaagccagattgtcagccctctataaattggagagtgactatgagatccttgaaagatttcctggtgcctatcttaaaggcaagaagtacaggcccctgtttgactatttcctgaagtgtaaagagaatggcgctttcactgtgcttgttgacaactatgtgaaggaagaagaaggcacaggggttgtccaccaagctccttacttcggtgctgaggactatcgggtctgtatggactttaacattattcggaaagactcactccctgtttgccctgtggatgcttcaggctgcttcacaacggaggtgacagatttcgcaggacagtatgtgaaggatgctgacaaaagtatcatcaggactttgaaggaacaaggccgacttctggttgccaccaccttcactcacagctaccctttttgctggagatcagacactcctctaatttacaaagcagtgcccagctggtttgtgcgagtggagaacatggtggaccagctcctaaggaacaatgacctgtgctactgggtcccagagttggtacgagaaaaacgatttggaaattggctgaaagatgcacgtgactggacaatttccagaaacagatactggggcacccccatcccactgtgggtcagcgatgactttgaggaggtggtatgcattgggtcagtggcggaacttgaagaactgtcaggagcaaagatctcagatctccacagagagagtgttgaccacctgaccattccttcacgctgtgggaagggatccttgcaccgcatctctgaagtgtttgactgttggtttgagagtggcagcatgccctatgctcaggttcattacccgtttgaaaacaagagggagtttgaggatgcttttcctgcagatttcattgccgagggcatcgaccaaaccagaggatggttttataccctgctggtgctggccacggccctctttggacaaccgcctttcaagaacgtaattgtgaatgggcttgtcctggcaagtgatggccaaaaaatgagcaaacggaaaaagaattatccagatccagtttccatcatccagaagtatggtgctgatgccctcagattatatctgattaactcccctgtggtgagagcagaaaacctccgctttaaagaagagggtgtgcgggacgtccttaaggatgtactgctcccatggtacaatgcctatcgcttcttaatccagaacgttctgaggctccagaaggaggaagaaatagaatttctctacaatgagaacacggttagagaaagccccaacattacagaccggtggatcctgtccttcatgcagtctctcattggcttctttgagactgaaatggcagcttataggctttatactgtggtgcctcgcctggtcaagtttgtagatattctgaccaattggtatgttagaatgaaccgcagaagattaaagggtgaaaatgggatggaggattgtgtcatggccctagaaaccttgtttagtgttctgctttctctttgcagacttatagctccctacacaccttttctcactgaattgatgtaccagaatctaaaggtgctgattgaccctgtttctgttcaggacaaggacacactcagcattcactacctcatgctgccccgtgttcgagaagaattgattgacaagaaaacagagagtgcagtatctcagatgcagtctgtgattgaacttggaagagtgatcagagaccgaaaaactattcccataaagtatcctttgaaagaaattgtggttatccatcaagatccagaagctcttaaagatatcaagtctttggagaagtatatcattgaggaactcaatgttcgaaaagttacactgtctacagataaaaacaagtatggcattcggctaagggcagaaccagatcacatggtcctggggaagcgtctgaagggagcctttaaggcagtgatgacgtccatcaagcagttgagcagtgaggagctggagcagttccagaagactgggaccattgttgtggaaggccatgaattgcacgatgaagacatccgcctcatgtacacctttgatcaggccacaggtgggactgcgcaatttgaagcacactcagatgctcaggctttggtcctcttagatgtcactcctgaccagtcaatggtagatgaaggaatggctcgggaagtcatcaatcgcatacagaaacttcgcaaaaagtgcaatctggttccaactgatgaaatcacagtgtactataaagcaaagtctgaaggaacatatctgaatagtgttattgaaagccacacagagttcatatttaccaccataaaggctcccttgaaaccatatccagtttctccatcggataaagtccttattcaagaaaaaacacagttgaagggatctgaactggaaattacactcaccagaggatcttcccttcctggtcctgcttgtgcatatgtcaatcttaacatttgtgcaaatggcagtgaacaaggtggagtattgctcctggaaaatccaaaaggtgacaataggttggaccttttaaagctgaagagtgttgtcactagcatttttggtgtgaaaaatacagagctggctgtcttccatgatgaaacagaaatacaaaaccaaactgacttactgagtcttagtggaaaaacactttgtgtgactgcaggatcggctccctctctgatcaacagttctagtactcttctttgtcagtatatcaacctacagctcctgaatgcaaagccacaagagtgtttaatggggacagtgggcactctcctgcttgaaaacccacttgggcagaatggactcacccaccaaggtcttctgtatgaagcagccaaggtgtttggccttcggagcaggaagctaaagctgtttctgaatgagacccaaacgcaggaaattacagaagacatccccgtgaagactttgaatatgaagactgtgtatgtttctgtgttaccaacaacagcagacttctagcatgtacttatcaatgttgttcggtcagcccttccctaattacacctatcccctacacatacatgcacatagacacacacatgaacacactgaagatatttccttcaggtgtgtgtaaaatatgctgcttggattgaaattcaaatgggattgattagtcaagtaacttgagacctcacagtaatcttcacacttaaccttagacacctatgcagtcatgttgggagcaggttacaatgttacttcagcccacagtttatttctattcttgagttcttaagtacagaagatagaagtgatttaaatggcatagtatatatatcattttctggccttttaaaatttatttgagacctcttgatgaaatggacatattatatatttctgccacctggattttcctggataatttgatggaatattttaagtttcagtaaatcagaacaataaacaaactcagatat

SEQ ID NO: 9 - DNA, 3074 bp, Homo sapiens
  mRNA (1)..(3074): NM_172230.2| Homo sapiens synovial apoptosis inhibitor 1, synoviolin (SYVN1), transcript variant 2
gggggtggggagtgttgttaaccggaggggcagccgcagtcgcgcggattgagcgggctcgcggcgctgggttcctggtctccgggccagggcaatgttccgcacggcagtgatgatggcggccagcctggcgctgaccggggctgtggtggctcacgcctactacctcaaacaccagttctaccccactgtggtgtacctgaccaagtccagccccagcatggcagtcctgtacatccaggcctttgtccttgtcttccttctgggcaaggtgatgggcaaggtgttctttgggcaactgagggcagcagagatggagcaccttctggaacgttcctggtacgccgtcacagagacttgtctggccttcaccgtttttcgggatgacttcagcccccgctttgttgcactcttcactcttcttctcttcctcaaatgtttccactggctggctgaggaccgtgtggactttatggaacgcagccccaacatctcctggctctttcactgccgcattgtctctcttatgttcctcctgggcatcctggacttcctcttcgtcagccacgcctatcacagcatcctgacccgtggggcctctgtgcagctggtgtttggctttgagtatgccatcctgatgacgatggtgctcaccatcttcatcaagtatgtgctgcactccgtggacctccagagtgagaacccctgggacaacaaggctgtgtacatgctctacacagagctgtttacaggcttcatcaaggttctgctgtacatggccttcatgaccatcatgatcaaggtgcacaccttcccactctttgccatccggcccatgtacctggccatgagacagttcaagaaagctgtgacagatgccatcatgtctcgccgagccatccgcaacatgaacaccctgtatccagatgccaccccagaggagctccaggcaatggacaatgtctgcatcatctgccgagaagagatggtgactggtgccaagagactgccctgcaaccacattttccataccagctgcctgcgctcctggttccagcggcagcagacctgccccacctgccgtatggatgtccttcgtgcatcgctgccagcgcagtcaccaccacccccggagcctgcggatcaggggccaccccctgccccccaccccccaccactcttgcctcagccccccaacttcccccagggcctcctgcctccttttcctccaggcatgttcccactgtggccccccatgggcccctttccacctgtcccgcctccccccagctcaggagaggctgtggctcctccatccaccagtgcagcagccctttctcggcccagtggagcagctacaaccacagctgctggcaccagtgctactgctgcttctgccacagcatctggcccaggctctggctctgccccagaggctggccctgcccctggtttccccttccctcctccctggatgggtatgcccctgcctccaccctttgccttccccccaatgcctgtgccccctgcgggctttgctgggctgaccccagaggagctacgagctctggagggccatgagcggcagcacctggaggcccggctgcagagcctgcgtaacatccacacactgctggacgccgccatgctgcagatcaaccagtacctcaccgtgctggcctccttggggcccccccggcctgccacttcagtcaactccactgaggagactgccactacagttgttgctgctgcctcctccaccagcatccctagctcagaggccacgaccccaaccccaggagcctccccaccagcccctgaaatggaaaggcctccagctcctgagtcagtgggcacagaggagatgcctgaggatggagagcccgatgcagcagagctccgccggcgccgcctgcagaagctggagtctcctgttgcccactgacactgccccagcccagccccagcctctgctcttttgagcagccctcgctggaacatgtcctgccaccaagtgccagctccctctctgtctgcaccagggagtagtacccccagctctgagaaagaggcggcatcccctaggccaagtggaaagaggctggggttcccatttgactccagtcccaggcagccatggggatctcgggtcagttccagccttcctctccaactcttcagccctgtgttctgctggggccatgaaggcagaaggtttagcctctgagaagccctcttcttcccccacccctttccaggagaaggggctgcccctccaagccctacttgtatgtgcggagtcacactgcagtgccgaacagtattagctcccgttcccaagtgtggactccagaggggctggaggcaagctatgaacttgctcgctggcccacccctaagactggtacccatttccttttcttaccctgatctccccagaagcctcttgtggtggtggctgtgccccctatgccctgtggcatttctgcgtcttactggcaaccacacaactcagggaaaggaatgcctgggagtgggggtgcaggcgggcagcactgagggaccctgccccgcccctccccccaggcccctttcctctgcagcttctcaagtgagactgacctgtctcacccagcagccactgcccagccgcactccaggcaagggccagtgcgcctgctcctgaccactgcaatcccagcgcccaaggaaggccacttctcaactggcagaacttctgaagtttagaattggaattacttccttactagtgtcttttggcttaaattttgtcttttgaagttgaatgcttaatcccgggaaagaggaacaggagtgccagactcctggtctttccagtttagaaaaggctctgtgccaaggagggaccacaggagctgggacctgcctgcccctgtcttttccccttggttttgtgttacaagagttgttggagacagtttcagatgattatttaatttgtaaatattgtacaaattttaatagcttaaattgtatatacagccaaataaaaacttgcattaacaaaaaaaaaaaaaaaaaaaaaaaaa

SEQ ID NO: 10 - DNA, 2354 bp, Homo sapiens
  mRNA (1)..(2354): NM_148842.1| Homo sapiens Williams-Beuren syndrome chromosome region 16 (WBSCR16), transcript variant 2
ggactggtgttaagggtcacgcaagatggcggcgcccagaggctgctgaggcgcggaacggaggatggcgctggtggcgttggtggctggggctcggctggggcggcggctgagcgggccggggctggggcgagggcactggacggcggccgggcgctcccggagccggcgcgaagcggcagaagccgaggcggaggtgcccgtggtccagtacgtgggcgagcgcgctgcccgcgccgatcgcgtcttcgtgtggggcttcagcttctcgggggcgctgggcgtgccttcctttgtggtgcccagctccgggcccgggccccgcgccggcgcccgaccgcgccgcaggatccagcccgtgccctatcgcctggagctggaccaaaagatttcatctgctgcttgcggctatggattcacactgctgtcctctaagactgcggatgttacgaaagtctgggggatgggactcaacaaagattctcagcttggatttcacaggagccggaaagataaaacgaggggctacgagtatgtgttggagccctcacccgtctccctgcctctggacagacctcaggagacacgggtgctgcaggtctcctgcggccgagctcactctcttgtgttgactgacagggaaggagtcttcagcatgggaaacaattcttatgggcaatgtggaagaaaggtggtcgaaaatgaaatttacagtgaaagtcacagagtccacaggatgcaggacttcgatggccaggtggtccaggtcgcctgtggtcaggatcatagtctgttcctgacggataaaggagaagtctattcttgtggatggggtgctgatgggcaaacaggtctgggtcactacaatatcaccagctcgcccaccaagctgggtggagacctggcgggagtgaacgttatccaagttgccacctacggtgattgctgcctggccgtgtccgccgacggaggactttttggttggggaaactcggagtacctgcagctggcctctgtcactgactccacacaggtgaatgtgccccgctgcttacacttctcaggagtggggaaggtgcgacaggctgcatgcggtggcacgggctgtgcagtgttaaacggagaaggacatgtttttgtctggggctatggaattcttgggaaaggtccaaacctagtggaaagtgccgtccctgaaatgattccacccactctctttggcttgacggagttcaacccagaaatccaggtttcccgcatccgatgtggactcagccactttgctgcactgaccaacaaaggagagctgtttgtatggggcaagaacatccgagggtgcctgggaatcggtcgcctggaggaccagtatttcccatggagggcacctgccccatccgccagcgccaagacaacaggcccactcctctgattacctccgggggatggacggcaaacaggtaaggagttccatgcaactgcggatggagcccctctgagaaacacatgcccctccaagtggggtctggggcctggagagaccctcccacccagcagaccaggagatagctgggggacaagggcagacggcccctgcctgggaaaaaccacactcacaccccaccccgaagagctgtggagaccaaaccaagactacgctacacacagaacgccgagaagataaaccaagctttacacgagcaggatggggatgggaaaactaaaggggccccctgtgaccgaggagcagggtccccagggggcagctcccacggagcgggcttgaacagggaccacccctgcagagccagccagggcggagagccataccctggccccagcgcgccccgacacacatgcttttctccatgacacgaggccagtccccaggagcagccccaggagcacaacctgagatttctaagcttgcaggttacaaaaaacaaaaaaaacagagaagctgcctgcgtaaaaagtgccacccacggaggcaggacacaggcagcgtgtggcccattcagcaggcccaggtcttcagggtgaggctgctggcgagggcaggggagagggggcattctggttaaaagcaagaaattccaaatactcctccctcgggatcaacatccccccaaataagggcgcccagggatcttgcctggggaaagtggggtgcagaaggcatgacccacgccacagcgggctctcagcacccttcccacgtcccatgtcacaggctctttgagctgctggctttgttctctcaagtcaggtctgagggaacccatcggcttctgtaataatcgtattgcctatatacttgaattaaaaatatatggtggctcaaaaaaaaaaaaaaa

SEQ ID NO: 11 - DNA, 3488 bp, Homo sapiens
  mRNA (1)..(3488): NM_021948.3| Homo sapiens brevican (BCAN), transcript variant 1
ccttgctctcgccgctgctgccggagccgaagcagagaaggcagcgggtcccgtgaccgtcccgagagccccgcgctcccgaccagggggcgggggcggccccggggagggcggggcaggggcggggggaagaaagggggttttgtgctgcgccgggagggccggcgccctcttccgaatgtcctgcggccccagcctctcctcacgctcgcgcagtctccgccgcagtctcagctgcagctgcaggactgagccgtgcacccggaggagacccccggaggaggcgacaaacttcgcagtgccgcgacccaaccccagccctgggtagcctgcagcatggcccagctgttcctgcccctgctggcagccctggtcctggcccaggctcctgcagctttagcagatgttctggaaggagacagctcagaggaccgcgcttttcgcgtgcgcatcgcgggcgacgcgccactgcagggcgtgctcggcggcgccctcaccatcccttgccacgtccactacctgcggccaccgccgagccgccgggctgtgctgggctctccgcgggtcaagtggactttcctgtcccggggccgggaggcagaggtgctggtggcgcggggagtgcgcgtcaaggtgaacgaggcctaccggttccgcgtggcactgcctgcgtacccagcgtcgctcaccgacgtctccctggcgctgagcgagctgcgccccaacgactcaggtatctatcgctgtgaggtccagcacggcatcgatgacagcagcgacgctgtggaggtcaaggtcaaaggggtcgtctttctctaccgagagggctctgcccgctatgctttctccttttctggggcccaggaggcctgtgcccgcattggagcccacatcgccaccccggagcagctctatgccgcctaccttgggggctatgagcaatgtgatgctggctggctgtcggatcagaccgtgaggtatcccatccagaccccacgagaggcctgttacggagacatggatggcttccccggggtccggaactatggtgtggtggacccggatgacctctatgatgtgtactgttatgctgaagacctaaatggagaactgttcctgggtgaccctccagagaagctgacattggaggaagcacgggcgtactgccaggagcggggtgcagagattgccaccacgggccaactgtatgcagcctgggatggtggcctggaccactgcagcccagggtggctagctgatggcagtgtgcgctaccccatcgtcacacccagccagcgctgtggtgggggcttgcctggtgtcaagactctcttcctcttccccaaccagactggcttccccaataagcacagccgcttcaacgtctactgcttccgagactcggcccagccttctgccatccctgaggcctccaacccagcctccaacccagcctctgatggactagaggctatcgtcacagtgacagagaccctggaggaactgcagctgcctcaggaagccacagagagtgaatcccgtggggccatctactccatccccatcatggaggacggaggaggtggaagctccactccagaagacccagcagaggcccctaggacgctcctagaatttgaaacacaatccatggtaccgcccacggggttctcagaagaggaaggtaaggcattggaggaagaagagaaatatgaagatgaagaagagaaagaggaggaagaagaagaggaggaggtggaggatgaggctctgtgggcatggcccagcgagctcagcagcccgggccctgaggcctctctccccactgagccagcagcccaggaggagtcactctcccaggcgccagcaagggcagtcctgcagcctggtgcatcaccacttcctgatggagagtcagaagcttccaggcctccaagggtccatggaccacctactgagactctgcccactcccagggagaggaacctagcatccccatcaccttccactctggttgaggcaagagaggtgggggaggcaactggtggtcctgagctatctggggtccctcgaggagagagcgaggagacaggaagctccgagggtgccccttccctgcttccagccacacgggcccctgagggtaccagggagctggaggccccctctgaagataattctggaagaactgccccagcagggacctcagtgcaggcccagccagtgctgcccactgacagcgccagccgaggtggagtggccgtggtccccgcatcaggtgactgtgtccccagcccctgccacaatggtgggacatgcttggaggaggaggaaggggtccgctgcctatgtctgcctggctatgggggggacctgtgcgatgttggcctccgcttctgcaaccccggctgggacgccttccagggcgcctgctacaagcacttttccacacgaaggagctgggaggaggcagagacccagtgccggatgtacggcgcgcatctggccagcatcagcacacccgaggaacaggacttcatcaacaaccggtaccgggagtaccagtggatcggactcaacgacaggaccatcgaaggcgacttcttgtggtcggatggcgtccccctgctctatgagaactggaaccctgggcagcctgacagctacttcctgtctggagagaactgcgtggtcatggtgtggcatgatcagggacaatggagtgacgtgccctgcaactaccacctgtcctacacctgcaagatggggctggtgtcctgtgggccgccaccggagctgcccctggctcaagtgttcggccgcccacggctgcgctatgaggtggacactgtgcttcgctaccggtgccgggaaggactggcccagcgcaatctgccgctgatccgatgccaagagaacggtcgttgggaggccccccagatctcctgtgtgcccagaagacctgcccgagctctgcacccagaggaggacccagaaggacgtcaggggaggctactgggacgctggaaggcgctgttgatccccccttccagccccatgccaggtccctagggggcaaggccttgaacactgccggccacagcactgccctgtcacccaaattttccctcacaccctgcgctcccgccaccacaggaagtgacaacatgacgaggggtggtactggagtccaggtgacagttcctgaaggggcttctgggaaatacctaggaggctccagcccagcccaggccctctccccctaccctgggcaccagatcttccatcagggccggagtaaatccctaagtgcctcaactgccctctccctggcagccatcttgtcccctctattcctctagggagcactgtgcccactctttctgggttttccaagggaatgggcttgcaggatggagtgtctgtaaaatcaacaggaaataaaactgtgtatgagcccaggcaaaaaaaaaaaaaaaaaaaaaaaa

SEQ ID NO: 12 - DNA, 7184 bp, Homo sapiens
  mRNA (1)..(7184): NM_014014.2| Homo sapiens activating signal cointegrator 1 complex subunit 3-like 1 (ASCC3L1)
cggcgcggcgggagcagagatctgcggccgtttgcagcttgcggtagggaggcgtggtggtctgaagcctccgagcagccgcggccatggcggatgtaaccgcccgtagtctgcaatacgagtacaaggcgaactcgaatcttgtgctccaagctgaccgttctctcattgaccggacccgccgggatgaacccacaggagaggtgctgtcccttgttgggaagctggagggcacccgtatgggagacaaggctcaacggaccaaaccgcagatgcaggaggaaagaagagccaagcgaagaaagcgtgatgaggaccggcatgacatcaacaagatgaagggttatactctgctgtcggagggcattgatgagatggtgggcatcatctacaagcccaaaactaaagagactcgggagacctatgaggtgctactcagcttcatccaggctgctcttggggaccagccacgtgatatcctttgtggggcagctgatgaagttctagctgttctaaagaatgaaaagctgcgggacaaggaaaggcgaaaggagattgacctgctgctgggtcaaacagatgataccagataccatgtgctagtgaacctgggcaaaaagatcacagactatggtggagataaggaaatccaaaatatggatgacaacattgatgagacatacggtgtgaatgtgcagtttgagtctgatgaggaggaaggtgatgaagacgtatacggggaggttcgagaagaggcatctgatgatgacatggaaggggacgaggctgtcgtgcgctgcaccctctcggctaatctcgtagcctcaggtgaactgatgagttccaagaagaaggatttgcaccctcgggatattgatgcattttggctgcagcggcagctcagtcgtttctatgatgatgccatcgtgtcgcagaagaaggcagatgaagtattggagattttgaagacggccagtgatgatcgggaatgtgaaaatcagctggttctgctgcttggtttcaacacctttgatttcattaaagtgttgcggcagcacaggatgatgattttatactgtaccttgctggccagtgcacaaagtgaagctgaaaaggaaaggattatgggaaagatggaagctgacccagagctatccaagttcctctaccagcttcatgaaaccgagaaggaggatctgatccgagaggaaaggtcccggagagagcgagtgcgtcagtctcgaatggacacagatctggaaaccatggatctcgaccagggtggagaggcactggctccacggcaggttctggacttggaggacctggtttttacccaagggagccactttatggccaataaacgctgtcagcttcctgatggatccttccgtcgccagcgtaagggctatgaagaggtgcatgtgcctgctctgaagcccaagccctttggctcagaagaacaactgcttccagtggaaaagctgccaaagtatgcccaggctgggtttgagggcttcaaaacactgaatcggatccagagtaagctctaccgtgctgcccttgagacggatgagaatctgctgctgtgtgctcctactggtgctgggaagaccaacgtggccctgatgtgcatgctccgagagattgggaaacacataaacatggacggcaccatcaatgtggatgacttcaagattatctacattgcccccatgcgctccttggtgcaggagatggtgggcagctttggaaagcgcctggccacttatggcatcactgttgctgaactgactggggaccaccagctgtgcaaagaagagatcagtgccactcagatcatcgtctgcacccccgagaagtgggacatcatcacccgcaagggtggtgagcgcacctacacccagctggtgcggctcatcattctggatgagattcatcttctccacgatgacagaggtcctgtcttagaagctttagtggccagggccatccgaaacattgagatgacccaagaggatgtccgactcattggtctcagtgccaccctacccaactatgaagatgtagccacctttctacgtgttgaccctgccaagggtctcttttactttgacaacagcttccgtccagtgcctctggaacagacatatgtgggtatcacagagaaaaaagctatcaagcgtttccagatcatgaatgaaatcgtctatgaaaaaatcatggaacatgctggaaaaaatcaggtgctggtgtttgtccactcccggaaggagactggaaagacagccagggccatccgggacatgtgcctagaaaaggacactctgggtctgtttctgagggagggctcagcctccacagaagtcctgcgaacagaagctgagcagtgcaagaacctagagctgaaggatcttctgccttatggctttgctattcatcacgcaggcatgaccagggttgaccgaacactcgtggaggatctttttgctgataaacatattcaggttttagtttccacagcaactctagcttggggtgtgaatctccctgcacatacagtcatcatcaaaggcacccaggtgtacagtccagagaaggggcgttggacagaactgggagcactggacattctgcagatgctgggacgtgccggaagaccccagtatgacaccaagggtgaaggcatactcatcacatctcatggggagctacagtactacctgtccctcctcaatcaacaacttcctattgaaagccagatggtttcaaagcttcctgacatgctcaatgcagaaatcgtgctaggaaatgtccagaatgccaaggatgcggtgaactggctgggctatgcctacctctatatccgaatgctgcgatccccaaccctctatggcatctctcatgatgacctcaagggagatcccctgctggaccagcgccgactagatctggttcatacagctgccctgatgctggacaagaacaatctggtcaagtacgacaagaagacgggcaacttccaggtgacagaactgggccgtatagccagccactactacatcaccaatgatacagtgcagacttacaaccagctgctgaagcccaccctgagtgagattgagcttttcagggtcttctcattgtcctctgagttcaagaacatcacagtgagagaggaggagaagctggagctgcagaagttgctggagagggtgcctatccctgtaaaggagagcattgaggaacccagtgctaagatcaacgttcttctgcaagccttcatctcacagctgaaattggagggctttgcactgatggctgacatggtgtatgtcacacagtcggctggccggttgatgcgagcgatatttgaaattgtcctgaaccgaggttgggcacagcttacagacaagaccctgaacctctgcaagatgatcgacaaacgcatgtggcagtccatgtgtcctctgcgccagttccggaaactccctgaggaagtagtgaagaagattgagaagaagaatttcccctttgagcgtctgtacgacctgaatcataatgagattggggagcttatccgcatgccaaagatggggaagaccatccacaaatatgtccatctgtttcccaagttggagttgtcagtgcacctgcagcctatcacacgctccaccctgaaggtggagctgaccatcacgccagacttccagtgggatgaaaaggtgcatggttcatccgaggctttttggattctggtggaggatgtggacagcgaggtgattctgcaccatgagtattttctcctcaaggccaagtacgcccaggacgagcacctcattacattcttcgtgcctgtctttgaaccgctgccccctcagtacttcatccgagtggtgtctgaccgctggctctcttgtgagacccagctgcctgtctccttccggcacctgatcttgccggagaagtacccccctccaaccgaacttttggacctgcagcccttgcccgtgtctgctctgagaaacagtgcctttgagagtctttaccaagataaatttcctttcttcaatcccatccagacccaggtgtttaacactgtatacaacagtgacgacaacgtgtttgtgggggcccccacgggcagcgggaagactatttgtgcagagtttgccatcctgcgaatgctgctgcagagctcggaggggcgctgtgtgtacatcacccccatggaggccctggcagagcaggtatacatggactggtacgagaagttccaggacaggctcaacaagaaggtggtactcctgacaggcgagaccagcacagacctgaagctgctgggcaaagggaacattatcatcagcacccctgagaagtgggacatactttcccggcgatggaagcagcgcaagaacgtgcagaacatcaacctcttcgtggtggatgaggtccaccttatcgggggcgagaatgggcctgtcttagaagtgatctgctcccgaatgcgctacatctcctcccagattgagcggcccattcgcattgtggcactcagctcttcgctctccaatgccaaggatgtggcccactggctgggctgcagtgccacctccaccttcaacttccatcccaatgtgcgtcccgtccccttggagctgcacatccagggcttcaacatcagccatacacaaacccgcctgctctccatggccaagcctgtgtaccatgctatcaccaagcactcgcccaagaagcctgtcattgtctttgtgccgtctcgcaagcagacccgcctcactgccattgacatcctcaccacctgtgcagcagacatccaacggcagaggttcttgcactgcaccgagaaggatctgattccgtacctggagaagctaagtgacagcacgctcaaggaaacgctgctaaatggggtgggctacctgcatgaggggctcagccccatggagcgacgcctggtggagcagctcttcagctcaggggctatccaggtggtggtggcttctcggagtctctgctggggcatgaacgtggctgcccacctggtaatcatcatggatacccagtactacaatggcaagatccacgcctatgtggattaccccatctatgacgtgcttcagatggtgggccacgccaaccgccctttgcaggacgatgaggggcgctgtgtcatcatgtgtcagggctccaagaaggatttcttcaagaagttcttatatgagccattgccagtagaatctcacctggaccactgtatgcatgaccacttcaatgctgagatcgtcaccaagaccattgagaacaagcaggatgctgtggactacctcacctggacctttctgtaccgccgcatgacacagaaccccaattactacaacctgcagggcatctcccatcgtcacttgtcggaccacttgtcagagctggtggagcagaccctgagtgacctggagcagtccaagtgcatcagcatcgaggacgagatggacgtggcgcctctgaacctaggcatgatcgccgcctactattacatcaactacaccaccattgagctcttcagcatgtccctcaatgccaagaccaaggtgcgagggcttatcgagatcatctccaatgcagcagagtatgagaacattcccatccggcaccatgaagacaatctcctgaggcagttggctcagaaggtcccccacaagctgaataaccctaagttcaatgatccgcacgtcaagaccaacctgctcctgcaggctcacttgtctcgcatgcagctgagtgctgagttgcagtcagatacggaggaaatccttagtaaggcaatccggctcatccaggcctgcgtggatgtcctttccagcaatgggtggctcagccctgctctggcagctatggaactggcccagatggtcacccaagccatgtggtccaaggactcatacctgaagcagctgccacacttcacctctgagcatatcaaacgttgcacagacaagggagtggagagtgttttcgacatcatggagatggaggatgaagaacggaacgcgttgcttcagctgactgacagccagattgcagatgtggctcgcttttgtaaccgctaccctaatatcgaactatcttatgaggtggtagataaggacagcatccgcagtggcgggccagttgtggtgctggtgcagctggagcgagaggaggaagtcacaggccctgtcattgcgcctctcttcccgcagaaacgtgaagagggctggtgggtggtgattggagatgccaagtccaatagcctcatctccatcaagaggctgaccttgcagcagaaggccaaggtgaagttggactttgtggccccagccactggtgcccacaactacactctgtacttcatgagtgacgcttacatgggatgtgaccaggagtacaaattcagcgtggatgtgaaagaagctgagacagacagtgattcagattgagtcctgaggcatttacttttgggtaaaggagagttgagcctgaattaggaatgtgtacattgtaggaatcctggttgtggggaccaggtctgtgggcctcaggtctggccagccagggctggtgctgtccccgcctacctccacttcctttcccttgctcactctggatccagtgacagcaggtgtcatgggtcaagcataaatcatatatagcattttcaggcatgttcctggtagttcttttgagtctgacattctaataaaataatttgtagaaaccatttgtctttgtagtgattccaaattaaaagttttctttctccaacctgagggcacggccaaaaagatctggttattttttagccaggaacgtgcttgttaatgagtatgtctggaggacagacctgctcattaggtgtgctgtcccctgtagcctcgtgagtcagcccagaggagggtacatgcgactgtggcctggcctcagtggtacccacacatcagcactaccacaagaaccaacactgagcctcggaagctagatcacaggttaggggtttctctagatgggggttctgaaatttgcagtgtctgctcctgggaggcagcaccagaaagggcactgaaatgtactagctggatgtgacccagtcttaataaacaggttttctaatccagaaaaaaaaaaaa

SEQ ID NO: 13 - DNA, 3885 bp, Homo sapiens
  mRNA (1)..(3885): NM_001417.3| Homo sapiens eukaryotic translation initiation factor 4B (EIF4B)
gattgcctcatccgggtcttttgcgttctctttccctctcccaacatggcggcctcagcaaaaaagaagaataagaaggggaagactatctccctaacagactttctggctgaggatgggggtactggtggaggaagcacctatgtttccaaaccagtcagctgggctgatgaaacggatgacctggaaggagatgtttcgaccacttggcacagtaacgatgacgatgtgtatagggcgcctccaattgaccgttccatccttcccactgctccacgggctgctcgggaacccaatatcgaccggagccgtcttcccaaatcgccaccctacactgcttttctaggaaacctaccctatgatgttacagaagagtcaattaaggaattctttcgaggattaaatatcagtgcagtgcgtttaccacgtgaacccagcaatccagagaggttgaaaggttttggttatgctgaatttgaggacctggattccctgctcagtgccctgagtctcaatgaagagtctctaggtaacaggagaattcgagtggacgttgctgatcaagcacaggataaagacagggatgatcgttcttttggccgtgatagaaatcgggattctgacaaaacagatacagactggagggctcgtcctgctacagacagctttgatgactacccacctagaagaggtgatgatagctttggagacaagtatcgagatcgttatgattcagaccggtatcgggatgggtatcgggatgggtatcgggatggcccacgccgggatatggatcgatatggtggccgggatcgctatgatgaccgaggcagcagagactatgatagaggctatgattcccggataggcagtggcagaagagcatttggcagtgggtatcgcagggatgatgactacagaggaggcggggaccgctatgaagaccgatatgacagacgggatgatcggtcgtggagctccagagatgattactctcgggatgattataggcgtgatgatagaggtcccccccaaagacccaaactgaatctaaagcctcggagtactcctaaggaagatgattcctctgctagtacctcccagtccactcgagctgcttctatctttggaggggcaaagcctgttgacacagctgctagagaaagagaagtagaagaacggctacagaaggaacaagagaagttgcagcgtcagctggatgagccaaaactagaacgacggcctcgggagagacacccaagctggcgaagtgaagaaactcaggaacgggaacggtcgaggacaggaagtgagtcatcacaaactgggacctccaccacatctagcagaaatgcacgaaggagagagagtgagaagtctctagaaaatgaaacactcaataaggaggaagattgccactctccaacttctaaacctcccaaacctgatcagcccctaaaggtaatgccagcccctccaccaaaggagaatgcttgggtgaagcgaagttctaaccctcctgctcgatctcagagctcagacacagagcagcagtcccctacaagtggtgggggaaaagtagctccagctcaaccatctgaggaaggaccaggaaggaaagatgaaaataaagtagatgggatgaatgccccaaaaggccaaactgggaactctagccgtggtccaggagacggagggaacagagaccactggaaggagtcagataggaaagatggcaaaaaggatcaagactccagatctgcacctgagccaaagaaacctgaggaaaatccagcttctaagttcagttctgcaagcaagtatgctgctctctctgttgatggtgaagatgaaaatgagggagaagattatgccgaatagacctctacatcctgtgcttttctcctagtttctctccaccctggaacattcgagagcaaatcaaaacctctatccagacaagacaaaataaaactcaccatctcctgaagacctttcttacctttttttaaaaacaaaaaatgaaattattttgcatgctgctgcagcctttaaagtattgaagtaactggagaattgccaatacagccagagagaaagggactacagctttttagaggaaaagttgtggtgcgttatgtcaccatgcagttgccagtgtgattagtgcctaggggtctccatttagcagaaatggtaatgacagtgatataatgcctggaacctggttgggcagtaggggagggaggtagaaggaaaagtgtgagatttctaccttttagtttttatcctattgtggcatatatgaattctcaaacattatctgaataaattttccactcttggaaaggtagatttagcctcaagttgttctagtctccaggaggctgccagcccctcctcttatttaattctgagttttgggggccagcctagagggaattccttttttttttttaaccccccaggggggtagttgggagtgagactataggccataaagaatgggactgcattggaccaaaataaatgggaaaatcgtggtttgaaaagaagcttttgggaagtgatgagtcattttgcaccaggtaataggggaaaattgtgtgacctccagcaaacacatgaatggttatttcctggagccggaagcacttgggggtcgtggtaattcccagtgttttctgtgtcctagttttaccctttctaaacactgtcctttttgaaagttttgaatatatccacattctattgaaaccttgaaactaaaaatttagactcttatcatcatcttaagttcttcatgctactcttaacctcccaaaaagcagtatctaagtcacatacatgatgtcttgggcattttctcagccatggagaactctgaaaggaagaatcgctgcttttctcaagcaaatcggtttcttgatgtcttttggttctccttgcctgctcctgatgcttggaccccttttattgatcagagtgctctagaataatggatggtcttggatgatggataaatagggacagggacagttaaattgggagcctttcttacaaccttgatgggatttttccccccaagtttccttctccactgaaatgccacactaatgcttgttggattcatgaggtggccagaccaatgtgttgttttgttgttgtttttttaagcttcccttgagagaataaatggtaatggagagaactatttaacaaggtcctggtttctcttgcaacacagtagctaaacttgcctgcttttatatgcatttttgtagggatcagcttggtagacagtattagcggagaaacaccttgatcttggtttgcaagcccttctcccatcagtcctagattaggccctgttcagccatgcaggggtgttggtttatgcgtgctgcagcagtgggcataatgaatataatttacccagtggacaaaggtgtgtaccaagtgaatttaaataattggtgtggattggccagtagctaagaagtgggcttttaaagagtattgaagattgaaagggtttttctttcttttttaaaaaagaaaaacaaactattgattgtagataatgaaaagctagggtttgccctcttcatgtctactctccttccaaatagttatatccaaaactgtttttccctctcccctaccttgtcccccctattaaaatagaaacagggattgattaatgtcccgctcctgaatacatgtaaaatttgtacaaaaatatcttctatgaaaatgatttgtaatctgtagacttattacctgggagatgtcttgatgtaaaatcccatcctttgggttgtgggttttttgttttctccaaataaatctgatctttaaagttcaaaaaaaaaaaaaaaaaaa

SEQ ID NO: 14 - DNA, 6019 bp, Homo sapiens
  mRNA (1)..(6019): NM_002271.4| Homo sapiens RAN binding protein 5 (RANBP5)
gacctcccacaactggagcagccgggaacagctctgaccacagtggttccggggagaagcctttccaggacccatgtgtaggcacaactgttttccctgatcaggatacttgcggcactcaacagaggaaagaaattcctaagggaacactgctcagaaagtactgcagcatgtcttcaaatgcctgaggatcaagttggaaaactagaagcaacagaaaacacaataagcgcaatggcggcggccgcggcggagcagcaacagttctacctgctcctgggaaacctgctcagccccgacaatgtggtccggaaacaggcagaggaaacctatgagaatatcccaggccagtcaaagatcacattcctcttacaagccatcagaaatacaacagctgctgaagaggctagacaaatggccgccgttctcctaagacgtctcttgtcctctgcatttgatgaagtctatccagcacttccctctgatgttcagactgccatcaagagtgagctactcatgattattcagatggaaacacaatctagcatgaggaaaaaagtttgtgatattgcggcagaactggccaggaatttaatagatgaggatggcaataaccagtggcccgaaggtttgaagttcctttttgattcagtcagctctcaaaatgtgggactgcgggaagctgcccttcacattttctggaactttcctggaatttttgggaaccagcaacaacactatttagatgtcatcaaacgaatgttagttcagtgtatgcaagatcaggaacacccgtcgatcaggacgttatctgctagagctacagctgcatttatacttgcaaatgagcataatgttgctctgttcaaacattttgcagacttgctaccgggattcctacaggcggtaaatgactcgtgctaccagaatgatgattctgtcctaaaatccctcgttgagattgcagatactgttccaaagtatttgcgtcctcacttggaagcaactctacagctaagtctaaagttgtgtggagacactagcctcaacaatatgcaacgccagcttgcccttgaagtgatcgtcaccctctctgagactgcagctgctatgttaagaaaacataccaatattgttgcacagactattcctcagatgttagcaatgatggttgatttggaagaagatgaggactgggcaaatgcagatgaactagaagatgatgattttgacagcaatgcagttgcaggcgagagtgctctagatcgaatggcttgcggacttggtggaaagctcgttctgccgatgatcaaggaacacattatgcaaatgcttcaaaatcctgactggaaataccggcatgcaggattgatggccttatctgccattggtgaagggtgccaccagcaaatggaaggaattctaaatgagatcgtaaattttgttttactttttctccaggatcctcatccaagagtaaggtatgcagcctgtaatgccgtgggacagatggctacagattttgcacctggtttccaaaagaaatttcatgagaaggtgattgcagctctgctgcagaccatggaagaccaaggcaatcaacgtgtgcaggcccatgcagctgctgccctcattaactttactgaagactgtcccaagtcactacttattccatacttggataatttggtgaaacatctgcattccattatggtactgaagcttcaagagctgattcagaaaggcaccaagttagttttggaacaagttgtgacatccattgcatcagttgccgatactgcagaagaaaaatttgtcccctactatgatttatttatgccatcactgaagcacatcgttgagaatgcggttcaaaaagaactgagacttctgagaggaaaaactattgaatgcattagcctcattggtctggctgttgggaaggaaaaattcatgcaggatgcatcagatgtgatgcagcttttgttaaagacccagacagacttcaatgatatggaagatgatgatcctcagatctcttacatgatctcagcatgggccagaatgtgcaaaatccttggaaaagaatttcagcaataccttccagtggttatggggcctttaatgaagacggcttcaattaagcccgaagtagcccttttagatacccaagacatggagaatatgagtgatgatgatggttgggaatttgtgaaccttggagatcagcaaagctttggtattaaaactgcaggactagaagaaaaatcaactgcttgccagatgttggtttgctatgctaaggagttaaaggaaggctttgtggagtacaccgaacaggttgtcaaactgatggtccctttactgaaattttatttccacgatggtgttcgagtggcagcagcggaatccatgcctcttctcctggagtgtgcaagagtccgtggtcctgagtatctcacacagatgtggcattttatgtgtgatgctctaattaaggccattggtacagaaccagattcagacgtcctctcagaaataatgcattcttttgcaaagtgcattgaagtaatgggagatggatgccttaataatgaacactttgaagaactgggaggtatattgaaagcaaagcttgaagaacattttaaaaatcaagaattacgacaagttaaaagacaagatgaagactatgatgaacaggtcgaagagtcactacaagatgaggatgataatgatgtttatattctgaccaaagtgtcagatattttacactcaatattcagtagctacaaagaaaaggtgttaccatggtttgaacagctgcttccattaattgtcaacctcatttgtccacatagaccatggccagacagacaatggggattatgcatctttgatgatgtcatagaacactgtagtccagcctcatttaaatacgcagaatatttcttaagaccaatgctccaatatgtatgtgacaacagcccagaagtcaggcaagcagctgcatatggcctgggagtcatggcacagtacggtggagataattatcgccctttttgtacagaagcacttcccctgctggtaagagttattcagtctgcggattctaagaccaaagaaaatgtcaatgctacagagaactgcatctcagcagtagggaaaatcatgaagttcaagcctgactgtgtaaacgttgaagaggtccttccacactggttgtcttggcttccactacatgaagataaagaagaagctgttcagactttcaattatctgtgtgacctgattgaaagtaatcatccaattgttcttggcccaaacaataccaatctgcccaaaatatttagtataattgcggaaggagaaatgcacgaggcaattaaacatgaagatccttgtgccaaacgtctggccaatgtcgttcgccaagtacagacttctggaggactgtggactgagtgcatagcacagctcagtcctgagcagcaggccgccattcaggagctcctgaactctgcgtgaagggccttaatgtcacccaccagaaaactaactccaaataaacgcttaccctttcctttaggtttctttgttttgtttttgagcaaaagagatcggtagtgttgtgtgtaggccattcttctggagagccacaagcaggaagagcagcgctgtgttgcagaatggagtttccatggatttctaccagaccactgaaggagttcctggaagccctgcggtagctagcactgaagactatttttctattggtataacccgcccacctgaaggggaaagggaaatcaaattaatttttctcgttagacataaggaaatttaaggaaaaacagctttaagaacagttactcagcgtagatgtgtgttcacacaaattgctctgcattcagtgttcattgtgaattgggagtgtgagtctttctgtagggtagaaagaagcctcctacccagcaaaccagtagacccaaaagttgaaaaaaactgatgacagacaacaagcatgaagatggcatatttgatgtcactttggttctttttcccagaaggcttatacagtgactcagtcgggaagctttccagcttccagcccttgaatgtgaagtgtcattggcatgtctggcagtagtctctcattcactcctcaataaacaacattgaatacaaaagaggcttgtgtaaaaactcagtactgtctggcttggattcatttcatgtttttaatataagaatgatctaatatttttttaaagtaatagctatcagtaatagctgagtgttttttcccctaatattttccttgtgcaattcagacttaagcatcgagtttttaccatcttccactttaagctaagttatgatacctattccattcacaattggtgttctttttaaggtttgcaaatttcagccaattttgtagctaagattgttctgatcagctcaaaaagatttggcttagtgttttcattgcaaattataattgctgtagagccacacacaacttttgaacttttaattataagtgttatggctaaagttatttactgaaaatttcagtaaaatgtgtgaatgtttctttatgtattaacctcatagcagtaaatgacttgctgttgtttaatttttctaaggcatcttaatagacttctgttgaaaacttcagtgttaacatttttatagtttgtactaaatttaaccgtgatataaaaatgaattttatgcatagatcagaattttaaattaaaggttttttctttaaatgatttgtattactttattaaaactaaatctgaaatggaatagaaaatagaatggattacatacagatggtttccttgttagcagatgcccttcaaatatattttacgtttgcagcacaacaccattgcccggaggcttccgaatctagcaaagcagcatattaaatgactccacctgcgcagtccttgtgttcagtggatgaatacctgtgggctcttgtaatgtgtggtaatatttggagctttatagcctgtattccttgggagaaaaaaatgggaattggagtaaaaagtgtgtcaagacaacccctttctgctttcttatgtagcatctgcaaagccgattcatgtactgatgccaatcagctagagcaatgtaggctttttttaatttaaattattactacactttattactacacttgcagaaaagaaacatgttaaaatcatggcacacctgcagaatttcagatgacagtgtggtcagaagatgttttttgggagaacctagtgtttgctgggcactatgctaagcactttgggagcaagaacctcctaccttccagtttaaacactagtggtattgtcagatgccgttagtatctgagatgtacttacagcagggttctaagagctctgaaagaagcgctctgttagatgcagactggcagcatcctccttgataaaagcagaaaagcaaagaggtaattggagttgaatcaagttaatagggaaggttggtagtaaatgctgttagtgtgacatgattctgaaacccagagctcagaactaactgtgagatgtaccatgaactaacaattctttgaaaggacctgcagaagcatttttaatacctcattctgtctatgcaagatgaaaatccatggagttttttcttggcttttgtaccaaatttaggggtcttgcatgtcagcaagtgatatatattgtttataaatgcaagctatttctggaggggaaaaatgtgtgtggctcttacgttttctgggaattttgtaacaagttacacgcacaagtgttagaaactttggcataactcaatttggagtattttttaaatgctgtatctttaaagaaaagtaaaattgtcttaaatctaattgacacttctgtaatgagaggcaaccttataactctggagttgtagtttgacagaaccatcagtaaagacataagcaaataaatggtcttggtgcaaaaaaaaaaaaaaaaaa

SEQ ID NO: 15 - DNA, 2204 bp, Homo sapiens
  mRNA (1)..(2204): NM_005030.3| Homo sapiens polo-like kinase 1 (Drosophila) (PLK1)
gagcggtgcggaggctctgctcggatcgaggtctgcagcgcagcttcgggagcatgagtgctgcagtgactgcagggaagctggcacgggcaccggccgaccctgggaaagccggggtccccggagttgcagctcccggagctccggcggcggctccaccggcgaaagagatcccggaggtcctagtggacccacgcagccggcggcgctatgtgcggggccgctttttgggcaagggcggctttgccaagtgcttcgagatctcggacgcggacaccaaggaggtgttcgcgggcaagattgtgcctaagtctctgctgctcaagccgcaccagagggagaagatgtccatggaaatatccattcaccgcagcctcgcccaccagcacgtcgtaggattccacggctttttcgaggacaacgacttcgtgttcgtggtgttggagctctgccgccggaggtctctcctggagctgcacaagaggaggaaagccctgactgagcctgaggcccgatactacctacggcaaattgtgcttggctgccagtacctgcaccgaaaccgagttattcatcgagacctcaagctgggcaaccttttcctgaatgaagatctggaggtgaaaataggggattttggactggcaaccaaagtcgaatatgacggggagaggaagaagaccctgtgtgggactcctaattacatagctcccgaggtgctgagcaagaaagggcacagtttcgaggtggatgtgtggtccattgggtgtatcatgtataccttgttagtgggcaaaccaccttttgagacttcttgcctaaaagagacctacctccggatcaagaagaatgaatacagtattcccaagcacatcaaccccgtggccgcctccctcatccagaagatgcttcagacagatcccactgcccgcccaaccattaacgagctgcttaatgacgagttctttacttctggctatatccctgcccgtctccccatcacctgcctgaccattccaccaaggttttcgattgctcccagcagcctggaccccagcaaccggaagcccctcacagtcctcaataaaggcttggagaaccccctgcctgagcgtccccgggaaaaagaagaaccagtggttcgagagacaggtgaggtggtcgactgccacctcagtgacatgctgcagcagctgcacagtgtcaatgcctccaagccctcggagcgtgggctggtcaggcaagaggaggctgaggatcctgcctgcatccccatcttctgggtcagcaagtgggtggactattcggacaagtacggccttgggtatcagctctgtgataacagcgtgggggtgctcttcaatgactcaacacgcctcatcctctacaatgatggtgacagcctgcagtacatagagcgtgacggcactgagtcctacctcaccgtgagttcccatcccaactccttgatgaagaagatcaccctccttaaatatttccgcaattacatgagcgagcacttgctgaaggcaggtgccaacatcacgccgcgcgaaggtgatgagctcgcccggctgccctacctacggacctggttccgcacccgcagcgccatcatcctgcacctcagcaacggcagcgtgcagatcaacttcttccaggatcacaccaagctcatcttgtgcccactgatggcagccgtgacctacatcgacgagaagcgggacttccgcacataccgcctgagtctcctggaggagtacggctgctgcaaggagctggccagccggctccgctacgcccgcactatggtggacaagctgctgagctcacgctcggccagcaaccgtctcaaggcctcctaatagctgccctcccctccggactggtgccctcctcactcccacctgcatctggggcccatactggttggctcccgcggtgccatgtctgcagtgtgccccccagccccggtggctgggcagagctgcatcatccttgcaggtgggggttgctgtgtaagttatttttgtacatgttcgggtgtgggttctacagccttgtccccctccccctcaaccccaccatatgaattgtacagaatatttctattgaattcggaactgtcctttccttggctttatgcacattaaacagatgtgaatattcaaaaaaaaaaaaaaaaaaaaaaaaaaaaaaaaaaa

SEQ ID NO: 16 - DNA, 5539 bp, Homo sapiens
  mRNA (1)..(5539): gi|38201620|ref|NM_182917.2| Homo sapiens eukaryotic translation initiation factor 4 gamma, 1 (EIF4G1), transcript variant 1
cctgtgtgcccctgggccaggcccgaacccggtgtccccgggtggggggtggggacgccacggccgaagcagctagctccgttcgtgatccgggagcctggtgccagcgagacctggaatttccggtctggttggtctggggccccgcggagccaggttgataccctcacctcccaaccccaggccctcggatgcccagaacctgtaggccgcaccgtggacttgttcttaatcgagggggtgctggggggaccctgatgtggcaccaaatgaaatgaacaaagctccacagtccacaggccccccacccgccccatcccccggactcccacagccagcgtttcccccggggcagacagcgccggtggtgttcagtacgccacaagcgacacaaatgaacacgccttctcagccccgccagcacttctaccctagccgggcccagcccccgagcagtgcagcctcccgagtgcagagtgcagcccctgcccgccctggcccagctgcccatgtctaccctgctggatcccaagtaatgatgatcccttcccagatctcctacccagcctcccagggggcctactacatccctggacaggggcgttccacatacgttgtcccgacacagcagtaccctgtgcagccaggagccccaggcttctatccaggtgcaagccctacagaatttgggacctacgctggcgcctactatccagcccaaggggtgcagcagtttcccactggcgtggcccccgccccagttttgatgaaccagccaccccagattgctcccaagagggagcgtaagacgatccgaattcgagatccaaaccaaggaggaaaggatatcacagaggagatcatgtctggggcccgcactgcctccacacccacccctccccagacgggaggcggtctggagcctcaagctaatggggagacgccccaggttgctgtcattgtccggccagatgaccggtcacagggagcaatcattgctgaccggccagggctgcctggcccagagcatagcccttcagaatcccagccttcgtcgccttctccgaccccatcaccatccccagtcttggaaccggggtctgagcctaatctcgcagtcctctctattcctggggacactatgacaactatacaaatgtctgtagaagaatcaacccccatctcccgtgaaactggggagccatatcgcctctctccagaacccactcctctcgccgaacccatactggaagtagaagtgacacttagcaaaccggttccagaatctgagttttcttccagtcctctccaggctcccacccctttggcatctcacacagtggaaattcatgagcctaatggcatggtcccatctgaagatctggaaccagaggtggagtcaagcccagagcttgctcctcccccagcttgcccctccgaatcccctgtgcccattgctccaactgcccaacctgaggaactgctcaacggagccccctcgccaccagctgtggacttaagcccagtcagtgagccagaggagcaggccaaggaggtgacagcatcaatggcgccccccaccatcccctctgctactccagctacggctccttcagctacttccccagctcaggaggaggaaatggaagaagaagaagaagaggaagaaggagaagcaggagaagcaggagaagctgagagtgagaaaggaggagaggaactgctccccccagagagtacccctattccagccaacttgtctcagaatttggaggcagcagcagccactcaagtggcagtatctgtgccaaagaggagacggaaaattaaggagctaaataagaaggaggctgttggagaccttctggatgccttcaaggaggcgaacccggcagtaccagaggtggaaaatcagcctcctgcaggcagcaatccaggcccagagtctgagggcagtggtgtgcccccacgtcctgaggaagcagatgagacctgggactcaaaggaagacaaaattcacaatgctgagaacatccagcccggggaacagaagtatgaatataagtcagatcagtggaagcctctaaacctagaggagaaaaaacgttacgaccgtgagttcctgcttggttttcagttcatctttgccagtatgcagaagccagagggattgccacatatcagtgacgtggtgctggacaaggccaataaaacaccactgcggccactggatcccactagactacaaggcataaattgtggcccagacttcactccatcctttgccaaccttggccggacaacccttagcacccgtgggcccccaaggggtgggccaggtggggagctgccccgtgggccggctggcctgggaccccggcgctctcagcagggaccccgaaaagaaccacgcaagatcattgccacagtgttaatgaccgaagatataaaactgaacaaagcagagaaagcctggaaacccagcagcaagcggacggcggctgataaggatcgaggggaagaagatgctgatggcagcaaaacccaggacctattccgcagggtgcgctccatcctgaataaactgacaccccagatgttccagcagctgatgaagcaagtgacgcagctggccatcgacaccgaggaacgcctcaaaggggtcattgacctcatttttgagaaggccatttcagagcccaacttctctgtggcctatgccaacatgtgccgctgcctcatggcgctgaaagtgcccactacggaaaagccaacagtgactgtgaacttccgaaagctgttgttgaatcgatgtcagaaggagtttgagaaagacaaagatgatgatgaggtttttgagaagaagcaaaaagagatggatgaagctgctacggcagaggaacgaggacgcctgaaggaagagctggaagaggctcgggacatagcccggcggcgctctttagggaatatcaagtttattggagagttgttcaaactgaagatgttaacagaggcaataatgcatgactgtgtggtcaaactgcttaagaaccatgatgaagagtcccttgagtgcctttgtcgtctgctcaccaccattggcaaagacctggactttgaaaaagccaagccccgaatggatcagtatttcaaccagatggaaaaaatcattaaagaaaagaagacgtcatcccgcatccgctttatgctgcaggacgtgctggatctgcgagggagcaattgggtgccacgccgaggggatcagggtcccaagaccattgaccagatccataaggaggctgagatggaagaacatcgagagcacatcaaagtgcagcagctcatggccaagggcagtgacaagcgtcggggcggtcctccaggccctcccatcagccgtggacttccccttgtggatgatggtggctggaacacagttcccatcagcaaaggtagccgccccattgacacctcacgactcaccaagatcaccaagcctggctccatcgattctaacaaccagctctttgcacctggagggcgactgagctggggcaagggcagcagcggaggctcaggagccaagccctcagacgcagcatcagaagctgctcgcccagctactagtactttgaatcgcttctcagcccttcaacaagcggtacccacagaaagcacagataatagacgtgtggtgcagaggagtagcttgagccgagaacgaggcgagaaagctggagaccgaggagaccgcctagagcggagtgaacggggaggggaccgtggggaccggcttgatcgtgcgcggacacctgctaccaagcggagcttcagcaaggaagtggaggagcggagtagagaacggccctcccagcctgaggggctgcgcaaggcagctagcctcacggaggatcgggaccgtgggcgggatgccgtgaagcgagaagctgccctacccccagtgagccccctgaaggcggctctctctgaggaggagttagagaagaaatccaaggctatcattgaggaatatctccatctcaatgacatgaaagaggcagtccagtgcgtgcaggagctggcctcaccctccttgctcttcatctttgtacggcatggtgtcgagtctacgctggagcgcagtgccattgctcgtgagcatatggggcagctgctgcaccagctgctctgtgctgggcatctgtctactgctcagtactaccaagggttgtatgaaatcttggaattggctgaggacatggaaattgacatcccccacgtgtggctctacctagcggaactggtaacacccattctgcaggaaggtggggtgcccatgggggagctgttcagggagattacaaagcctctgagaccgttgggcaaagctgcttccctgttgctggagatcctgggcctcctgtgcaaaagcatgggtcctaaaaaggtggggacgctgtggcgagaagccgggcttagctggaaggaatttctacctgaaggccaggacattggtgcattcgtcgctgaacagaaggtggagtataccctgggagaggagtcggaagcccctggccagagggcactcccctccgaggagctgaacaggcagctggagaagctgctgaaggagggcagcagtaaccagcgggtgttcgactggatagaggccaacctgagtgagcagcagatagtatccaacacgttagttcgagccctcatgacggctgtctgctattctgcaattatttttgagactcccctccgagtggacgttgcagtgctgaaagcgcgagcgaagctgctgcagaaatacctgtgtgacgagcagaaggagctacaggcgctctacgccctccaggcccttgtagtgaccttagaacagcctcccaacctgctgcggatgttctttgacgcactgtatgacgaggacgtggtgaaggaggatgccttctacagttgggagagtagcaaggaccccgctgagcagcagggcaagggtgtggcccttaaatctgtcacagccttcttcaagtggctccgtgaagcagaggaggagtctgaccacaactgagggctggtggggccggggacctggagccccatggacacacagatggcccggctagccgcctggactgcaggggggcggcagcagcggcggtggcagtgggtgcctgtagtgtgatgtgtctgaactaataaagtggctgaagaggcaggatggcttggggctgcctgggcccccctccaggatgccgccaggtgtccctctcctccccctggggcacagagatatattatatataaagtcttgaaatttggtgtgtcttggggtggggaggggcaccaacgcctgcccctggggtccttttttttattttctgaaaatcactctcgggactgccgtcctcgctgctgggggcatatgccccagcccctgtaccacccctgctgttgcctgggcagggggaagggggggcacggtgcctgtaattattaaacatgaattcaattaagctcaaaaaaaaaaaaaaaa

SEQ ID NO: 17 - DNA, 4221 bp, Homo sapiens
  mRNA (1)..(4221): gi|13435358|ref|NM_001923.2| Homo sapiens damage-specific DNA binding protein 1, 127kDa (DDB1)
cagcggcagtggagttcgctgcgcgctgttgggggccacctgtcttttcgcttgtgtccctctttctagtgtcgcgctcgagtcccgacgggccgctccaagcctcgacatgtcgtacaactacgtggtaacggcccagaagcccaccgccgtgaacggctgcgtgaccggacactttacttcggccgaagacttaaacctgttgattgccaaaaacacgagattagagatctatgtggtcaccgccgaggggcttcggcccgtcaaagaggtgggcatgtatgggaagattgcggtcatggagcttttcaggcccaagggggagagcaaggacctgctgtttatcttgacagcgaagtacaatgcctgcatcctggagtataaacagagtggcgagagcattgacatcattacgcgagcccatggcaatgtccaggaccgcattggccgcccctcagagaccggcattattggcatcattgaccctgagtgccggatgattggcctgcgtctctatgatggccttttcaaggttattccactagatcgcgataataaagaactcaaggccttcaacatccgcctggaggagctgcatgtcattgatgtcaagttcctatatggttgccaagcacctactatttgctttgtctaccaggaccctcaggggcggcacgtaaaaacctatgaggtgtctctccgagaaaaggaattcaataagggcccttggaaacaggaaaatgtcgaagctgaagcttccatggtgatcgcagtcccagagccctttgggggggccatcatcattggacaggagtcaatcacctatcacaatggtgacaaatacctggctattgcccctcctatcatcaagcaaagcacgattgtgtgccacaatcgagtggaccctaatggctcaagatacctgctgggagacatggaaggccggctcttcatgctgcttttggagaaggaggaacagatggatggcaccgtcactctcaaggatctccgtgtagaactccttggagagacctctattgctgagtgcttgacataccttgataatggtgttgtgtttgtcgggtctcgcctgggtgactcccagcttgtgaagctcaacgttgacagtaatgaacaaggctcctatgtagtggccatggaaacctttaccaacttaggacccattgtcgatatgtgcgtggtggacctggagaggcaggggcaggggcagctggtcacttgctctggggctttcaaggaaggttctttgcggatcatccggaatggaattggaatccacgagcatgccagcattgacttaccaggcatcaaaggattatggccactgcggtctgaccctaatcgtgagacttatgacactttggtgctctcttttgtgggccagacaagagttctcatgttaaatggagaggaggtagaagaaaccgaactgatgggtttcgtggatgatcagcagactttcttctgtggcaacgtggctcatcagcagcttatccagatcacttcagcatcggtgaggttggtctctcaagaacccaaagctctggtcagtgaatggaaggagcctcaggccaagaacatcagtgtggcctcctgcaatagcagccaggtggtggtggctgtaggcagggccctctactatctgcagatccatcctcaggagctccggcagatcagccacacagagatggaacatgaagtggcttgcttggacatcaccccattaggagacagcaatggactgtcccctctttgtgccattggcctctggacggacatctcggctcgtatcttgaagttgccctcttttgaactactgcacaaggagatgctgggtggagagatcattcctcgctccatcctgatgaccacctttgagagtagccattacctcctttgtgccttgggagatggagcgcttttctactttgggctcaacattgagacaggtctgttgagcgaccgtaagaaggtgactttgggcacccagcccaccgtattgaggacttttcgttctctttctaccaccaacgtctttgcttgttctgaccgccccactgtcatctatagcagcaaccacaaattggtcttctcaaatgtcaacctcaaggaagtgaactacatgtgtcccctcaattcagatggctatcctgacagcctggcgctggccaacaatagcaccctcaccattggcaccatcgatgagatccagaagctgcacattcgcacagttcccctctatgagtctccaaggaagatctgctaccaggaagtgtcccagtgtttcggggtcctctccagccgcattgaagtccaagacacgagtgggggcacgacagccttgaggcccagcgctagcacccaggctctgtccagcagtgtaagctccagcaagctgttctccagcagcactgctcctcatgagacctcctttggagaagaggtggaggtgcataacctacttatcattgaccaacacacctttgaagtgcttcatgcccaccagtttctgcagaatgaatatgccctcagtctggtttcctgcaagctgggcaaagaccccaacacttacttcattgtgggcacagcaatggtgtatcctgaagaggcagagcccaagcagggtcgcattgtggtctttcagtattcggatggaaaactacagactgtggctgaaaaggaagtgaaaggggccgtgtactctatggtggaatttaacgggaagctgttagccagcatcaatagcacggtgcggctctatgagtggacaacagagaaggacgtgcgcactgagtgcaaccactacaacaacatcatggccctctacctgaagaccaagggcgacttcatcctggtgggcgaccttatgcgctcagtgctgctgcttgcctacaagcccatggaaggaaactttgaagagattgctcgagactttaatcccaactggatgagtgctgtggaaatcttggatgatgacaattttctgggggctgaaaatgcctttaacttgtttgtgtgtcaaaaggatagcgctgccaccactgacgaggagcggcagcacctccaggaggttggtcttttccacctgggcgagtttgtcaatgtcttttgccacggctctctggtaatgcagaatctgggtgagacttccacccccacacaaggctcggtgctcttcggcacggtcaacggcatgatagggctggtgacctcactgtcagagagctggtacaacctcctgctggacatgcagaatcgactcaataaagtcatcaaaagtgtggggaagatcgagcactccttctggagatcctttcacaccgagcggaagacagaaccagccacaggtttcatcgacggtgacttgattgagagtttcctggatattagccgccccaagatgcaggaggtggtggcaaacctacagtatgacgatggcagcggtatgaagcgagaggccactgcagacgacctcatcaaggttgtggaggagctaactcggatccattagccaagggcagggggcccctttgctgaccctccccaaaggctttgccctgctgccctccccctcctctccaccatcgtcttcttggccatgggaggcctttccctaagccagctgcccccagagccacagttcccctatgtggaagtggggcgggcttcatagagacttgggaatgagctgaaggtgaaacattttctccctggatttttaccagtctcacatgattccagccatcaccttagaccaccaagccttgattggtgttgccagttgtcctccttccggggaaggattttgcagttctttggctgaaaggaagctgtgcgtgtgtgtgtgtgtatgtgtgtgtgtgtatgtgtatctcacactcatgcattgtcctctttttatttagattggcagtgtagggagttgtgggtagtggggaagagggttaggagggtttcattgtctgtgaagtgagaccttccttttacttttcttctattgcctctgagagcatcaggcctagaggcctgactgccaagccatgggtagcctgggtgtaaaacctggagatggtggatgatccccacgccacagcccttttgtctctgcaaactgccttcttcggaaagaagaaggtgggaggatgtgaattgttagtttctgagttttaccaaataaagtagaatataagaagaaaaaaa

SEQ ID NO: 18 - DNA, 2989 bp, Homo sapiens
  mRNA (1)..(2989): gi|14971416|ref|NM_005762.2| Homo sapiens tripartite motif-containing 28 (TRIM28)
ggcgcgcgggcgagcggttgtgcttgtgcttgtggcgcgtggtgcgggtttcggcggcggctgaggaagaagcgcgggcggcgccttcgggaggcgagcaggcagcagttggccgtgccgtagcagcgtcccgcgcgcggcgggcagcggcccaggaggcgcgtggcggcgctcggcctcgcggcggcggcggcggcagcggcccagcagttggcggcgagcgcgtctgcgcctgcgcggcgggccccgcgcccctcctccccccctgggcgcccccggcggcgtgtgaatggcggcctccgcggcggcagcctcggcagcagcggcctcggccgcctctggcagcccgggcccgggcgagggctccgctggcggcgaaaagcgctccaccgccccttcggccgcagcctcggcctctgcctcagccgcggcgtcgtcgcccgcggggggcggcgccgaggcgctggagctgctggagcactgcggcgtgtgcagagagcgcctgcgacccgagagggagccccgcctgctgccctgtttgcactcggcctgtagtgcctgcttagggcccgcggcccccgccgccgccaacagctcgggggacggcggggcggcgggcgacggcaccgtggtggactgtcccgtgtgcaagcaacagtgcttctccaaagacatcgtggagaattatttcatgcgtgatagtggcagcaaggctgccaccgacgcccaggatgcgaaccagtgctgcactagctgtgaggataatgccccagccaccagctactgtgtggagtgctcggagcctctgtgtgagacctgtgtagaggcgcaccagcgggtgaagtacaccaaggaccatactgtgcgctctactgggccagccaagtctcgggatggtgaacgtactgtctattgcaacgtacacaagcatgaaccccttgtgctgttttgtgagagctgtgatactctcacctgccgagactgccagctcaatgcccacaaggaccaccagtaccagttcttagaggatgcagtgaggaaccagcgcaagctcctggcctcactggtgaagcgccttggggacaaacatgcaacattgcagaagagcaccaaggaggttcgcagctcaatccgccaggtgtctgacgtacagaagcgtgtgcaagtggatgtcaagatggccatcctgcagatcatgaaggagctgaataagcggggccgtgtgctggtcaatgatgcccagaaggtgactgaggggcagcaggagcgcctggagcggcagcactggaccatgaccaagatccagaagcaccaggagcacattctgcgctttgcctcttgggctctggagagtgacaacaacacagcccttttgctttctaagaagttgatctacttccagctgcaccgggccctcaagatgattgtggatcccgtggagccacatggcgagatgaagtttcagtgggacctcaatgcctggaccaagagtgccgaggcctttggcaagattgtggcagagcgtcctggcactaactcaacaggccctgcacccatggcccctccaagagccccagggcccctgagcaagcagggctctggcagcagccagcccatggaggtgcaggaaggctatggctttgggtcaggagatgatccctactcaagtgcagagccccatgtgtcaggtgtgaaacggtcccgctcaggtgagggcgaggtgagcggccttatgcgcaaggtgccacgagtgagccttgaacgcctggacctggacctcacagctgacagccagccacccgtcttcaaggtcttcccaggcagtaccactgaggactacaaccttattgttattgaacgtggcgctgccgctgcagctaccggccagccagggactgcgcctgcaggaacccctggtgccccacccctggctggcatggccattgtcaaggaggaggagacggaggctgccattggagcccctcctactgccactgagggccctgagaccaaacctgtgcttatggctcttgcggagggtcctggtgctgagggtccccgcctggcctcacctagtggcagcaccagctcagggctggaggtggtggctcctgagggtacctcagccccaggtggtggcccgggaaccctggatgacagtgccaccatttgccgtgtctgccagaagccaggcgatctggttatgtgcaaccagtgtgagttttgtttccacctggactgtcacctgccggccctgcaggatgtaccaggggaggagtggagctgctcactctgccatgtgctccctgacctgaaggaggaggatggcagcctcagcctggatggtgcagacagcactggcgtggtggccaagctctcaccagccaaccagcggaaatgtgagcgtgtactgctggccctattctgtcacgaaccctgccgccccctgcatcagctggctaccgactccaccttctccctggaccagcccggtggcaccctggatctgaccctgatccgtgcccgcctccaggagaagttgtcacctccctacagctccccacaggagtttgcccaggatgtgggccgcatgttcaagcaattcaacaagttaactgaggacaaggcagacgtgcagtccatcatcggcctgcagcgcttcttcgagacgcgcatgaacgaggccttcggtgacaccaagttctctgctgtgctggtggagcccccgccgatgagcctgcctggtgctggcctgagttcccaggagctgtctggtggccctggtgatggcccctgaggctggagcccccatggccagcccagcctggctctgttctctgtcctgtcaccccatccccactcccctggtggcctgactcccactccctggtggccccatcccccagttcctcacgatatggtttttacttctgtggatttaataaaaacttcaccagttaaaaaaaaaaaaaaaaaaaaaaaaaaaaaa

SEQ ID NO: 19 - DNA, 2912 bp, Homo sapiens
  mRNA (1)..(2912): gi|40254815|ref|NM_005348.2| Homo sapiens heat shock 90kDa protein 1, alpha (HSPCA), transcript variant 2
cagttgcttcagcgtcccggtgtggctgtgccgttggtcctgtgcggtcacttagccaagatgcctgaggaaacccagacccaagaccaaccgatggaggaggaggaggttgagacgttcgcctttcaggcagaaattgcccagttgatgtcattgatcatcaatactttctactcgaacaaagagatctttctgagagagctcatttcaaattcatcagatgcattggacaaaatccggtatgaaactttgacagatcccagtaaattagactctgggaaagagctgcatattaaccttataccgaacaaacaagatcgaactctcactattgtggatactggaattggaatgaccaaggctgacttgatcaataaccttggtactatcgccaagtctgggaccaaagcgttcatggaagctttgcaggctggtgcagatatctctatgattggccagttcggtgttggtttttattctgcttatttggttgctgagaaagtaactgtgatcaccaaacataacgatgatgagcagtacgcttgggagtcctcagcagggggatcattcacagtgaggacagacacaggtgaacctatgggtcgtggaacaaaagttatcctacacctgaaagaagaccaaactgagtacttggaggaacgaagaataaaggagattgtgaagaaacattctcagtttattggatatcccattactctttttgtggagaaggaacgtgataaagaagtaagcgatgatgaggctgaagaaaaggaagacaaagaagaagaaaaagaaaaagaagagaaagagtcggaagacaaacctgaaattgaagatgttggttctgatgaggaagaagaaaagaaggatggtgacaagaagaagaagaagaagattaaggaaaagtacatcgatcaagaagagctcaacaaaacaaagcccatctggaccagaaatcccgacgatattactaatgaggagtacggagaattctataagagcttgaccaatgactgggaagatcacttggcagtgaagcatttttcagttgaaggacagttggaattcagagcccttctatttgtcccacgacgtgctccttttgatctgtttgaaaacagaaagaaaaagaacaatatcaaattgtatgtacgcagagttttcatcatggataactgtgaggagctaatccctgaatatctgaacttcattagaggggtggtagactcggaggatctccctctaaacatatcccgtgagatgttgcaacaaagcaaaattttgaaagttatcaggaagaatttggtcaaaaaatgcttagaactctttactgaactggcggaagataaagagaactacaagaaattctatgagcagttctctaaaaacataaagcttggaatacacgaagactctcaaaatcggaagaagctttcagagctgttaaggtactacacatctgcctctggtgatgagatggtttctctcaaggactactgcaccagaatgaaggagaaccagaaacatatctattatatcacaggtgagaccaaggaccaggtagctaactcagcctttgtggaacgtcttcggaaacatggcttagaagtgatctatatgattgagcccattgatgagtactgtgtccaacagctgaaggaatttgaggggaagactttagtgtcagtcaccaaagaaggcctggaacttccagaggatgaagaagagaaaaagaagcaggaagagaaaaaaacaaagtttgagaacctctgcaaaatcatgaaagacatattggagaaaaaagttgaaaaggtggttgtgtcaaaccgattggtgacatctccatgctgtattgtcacaagcacatatggctggacagcaaacatggagagaatcatgaaagctcaagccctaagagacaactcaacaatgggttacatggcagcaaagaaacacctggagataaaccctgaccattccattattgagaccttaaggcaaaaggcagaggctgataagaacgacaagtctgtgaaggatctggtcatcttgctttatgaaactgcgctcctgtcttctggcttcagtctggaagatccccagacacatgctaacaggatctacaggatgatcaaacttggtctgggtattgatgaagatgaccctactgctgatgataccagtgctgctgtaactgaagaaatgccaccccttgaaggagatgacgacacatcacgcatggaagaagtagactaatctctggctgagggatgacttacctgttcagtactctacaattcctctgataatatattttcaaggatgtttttctttatttttgttaatattaaaaagtctgtatggcatgacaactactttaaggggaagataagatttctgtctactaagtgatgctgtgataccttaggcactaaagcagagctagtaatgctttttgagtttcatgttggttctttcacagatggggtaacgtgcactgtaagacgtatgtaacatgatgttaactttgtgtggtctaaagtgtttagctgtcaagccggatgcctaagtagaccaaatcttgttattgaagtgttctgagctgtatcttgatgtttagaaaagtattcgttacatcttgtaggatctactttttgaacttttcattccctgtagttgacaattctgcatgtactagtcctctagaaataggttaaactgaagcaacttgatggaaggatctctccacagggcttgttttccaaagaaaagtattgtttggaggagcaaagttaaaagcctacctaagcatatcgtaaagctgttcaaatactcgagcccagtcttgtggatggaaatgtagtgctcgagtcacattctgcttaaagttgtaacaaatacagatgagt

SEQ ID NO: 20 - DNA, 3820 bp, Homo sapiens
  mRNA (1)..(3820): gi|4503538|ref|NM_001418.1| Homo sapiens eukaryotic translation initiation factor 4 gamma, 2 (EIF4G2)
cagcagtgagtcggagctctatggaggtggcagcgggtaccgagtggcggctgcagcagcgactcctctgagctgagtttgaggccgtccccgactccttcctcccccttccctcccccttttttttgttttccgttcccctttcccctcccttccctatccccgacgaccggatcctgaggaggcagctgcggtggcagctgctgagttctcggtgaaggtatttcatttctcctgtcccctcccctccccaccccatctattaatattattcttttgaagattcttcgttgtcaagccgccaaagtggagagtgcgattgcagaagggggtgcttctcgtttcagtgcttcttcgggcggaggaggaagtaggggtgcacctcagcactatcccaagactgctggcaacagcgagttcctggggaaaaccccagggcaaaacgctcagaaatggattcctgcacgaagcactagacgagatgacaactccgcagcaaacaactccgcaaacgaaaaagaacgacatgatgcaatcttcaggaaagtaagaggcatactaaataagcttactcctgaaaagtttgacaagctatgccttgagctcctcaatgtgggtgtagagtctaaactcatccttaaaggggtcatactgctgattgtggacaaagccctagaagagccaaagtatagctcactgtatgctcagctatgtctgcgattggcagaagatgcaccaaactttgatggcccagcagcagagggtcaaccaggacagaagcaaagcaccacattcagacgcctcctaatttccaaattacaagatgaatttgaaaaccgaactagaaatgttgatgtctatgataagcgtgaaaatcccctcctccccgaggaggaggaacagagagccattgctaagatcaagatgttgggaaacatcaaattcattggagagcttggcaagcttgatcttattcacgaatctatccttcataagtgcatcaaaacacttttggaaaagaagaagagagtccaactcaaagatatgggagaggatttggagtgcctctgtcagataatgaggacagtgggacctagattagaccatgaacgagccaagtccttaatggatcagtactttgcccgaatgtgctccttgatgttaagtaaggaattgccagcaaggattcgtttcctgctgcaggataccgtagagttgcgagaacaccattgggttcctcgcaaggcttttcttgacaatggaccaaagacgatcaatcaaattcgtcaagatgcagtaaaagatctaggggtgtttattcctgctcctatggctcaagggatgagaagtgacttctttctggagggaccgttcatgccacccaggatgaaaatggatagggacccacttggaggacttgctgatatgtttggacaaatgccaggtagcggaattggtactggtccaggagttatccaggatagattttcacccaccatgggacgtcatcgttcaaatcaactcttcaatggccatgggggacacatcatgcctcccacacaatcgcagtttggagagatgggaggcaagtttatgaaaagccaggggctaagccagctctaccataaccagagtcagggactcttatcccagctgcaaggacagtcgaaggatatgccacctcggttttctaagaaaggacagcttaatgcagatgagattagcctgaggcctgctcagtcgttcctaatgaataaaaatcaagtgccaaagcttcagccccagataactatgattcctcctagtgcacaaccaccacgcactcaaacaccacctctgggacagacacctcagcttggtctcaaaactaatccaccacttatccaggaaaagcctgccaagaccagcaaaaagccaccaccgtcaaaggaagaactccttaaactaactgaaactgttgtgactgaatatctaaatagtggaaatgcaaatgaggctgtcaatggtgtaagagaaatgagggctcctaaacactttcttcctgagatgttaagcaaagtaatcatcctgtcactagatagaagcgatgaagataaagaaaaagcaagttctttgatcagtttactcaaacaggaagggatagccacaagtgacaacttcatgcaggctttcctgaatgtattggaccagtgtcccaaactggaggttgacatccctttggtgaaatcctatttagcacagtttgcagctcgtgccatcatttcagagctggtgagcatttcagaactagctcaaccactagaaagtggcacccattttcctctcttcctactttgtcttcagcagttagctaaattacaagatcgagaatggttaacagaactttttcaacaaagcaaggtcaatatgcagaaaatgctcccagaaattgatcagaataaggaccgcatgttggagattttggaaggaaagggactgagtttcttattcccactcctcaaattggagaaggaactgttgaagcaaataaagttggatccatcccctcaaaccatatataaatggattaaagataacatctctcccaaacttcatgtagataaaggatttgtgaacatcttaatgactagcttcttacagtacatttctagtgaagtaaacccccccagcgatgaaacagattcatcctctgctccttccaaagaacagttagagcaggaaaaacaactactactatctttcaagccagtaatgcagaaatttcttcatgatcacgttgatctacaagtcagtgccctgtatgctctccaggtgcactgctataacagcaacttcccaaaaggcatgttacttcgcttttttgtgcacttctatgacatggaaattattgaagaagaagctttcttggcttggaaagaagatataacccaagagtttccgggaaaaggcaaggctttgttccaggtgaatcagtggctaacctggttagaaactgctgaagaagaagaatcagaggaagaagctgactaaagaaccagccaaagccttaaattgtgcaaaacatactgttgctatgatgtaactgcatttgacctaaccactgcgaaaattcattccgctgtaatgttttcacaatatttaaagcagaagcacgtcagttaggatttccttctgcataaggtttttttgtagtgtaatgtcttaatcatagtctaccatcaaatattttaggagtatctttaatgtttagatagtatattagcagcatgcaataattacatcataagttctcaagcagaggcagtctattgcaaggaccttctttgctgccagttatcataggctgttttaagttagaaaactgaatagcaacactgaatactgtagaaatgcactttgctcagtaatacttgagttgttgcaatatttgattatccatttggttgttacagaaaaattcttaactgtaattgatggttgttgccgtaatagtatattgcctgtatttctacctctagtaatgggctttatgtgctagattttaatatccttgagcctgggcaagtgcacaagtctttttaaaagaaacatggtttacttgcacaaaactgatcagttttgagagatcgttaatgcccttgaagtggtttttgtgggtgtgaaacaaatggtgagaatttgaattggtccctcctattatagtattgaaattaagtctacttaatttatcaagtcatgttcatgccctgattttatatacttgtatctatcaataaacattgtgatacttgaaaaaaaaaaaaaaaaaaaaaaaaaaaaa

SEQ ID NO: 21 - DNA, 2011 bp, Homo sapiens
  mRNA (1)..(2011): gi|62388891|ref|NM_002266.2| Homo sapiens karyopherin alpha 2 (RAG cohort 1, importin alpha 1) (KPNA2)
gccacacggtctttgagctgagtcgaggtggaccctttgaacgcagtcgccctacagccgctgattccccccgcatcgcctcccgtggaagcccaggcccgcttcgcagctttctccctttgtctcataaccatgtccaccaacgagaatgctaatacaccagctgcccgtcttcacagattcaagaacaagggaaaagacagtacagaaatgaggcgtcgcagaatagaggtcaatgtggagctgaggaaagctaagaaggatgaccagatgctgaagaggagaaatgtaagctcatttcctgatgatgctacttctccgctgcaggaaaaccgcaacaaccagggcactgtaaattggtctgttgatgacattgtcaaaggcataaatagcagcaatgtggaaaatcagctccaagctactcaagctgccaggaaactactttccagagaaaaacagccccccatagacaacataatccgggctggtttgattccgaaatttgtgtccttcttgggcagaactgattgtagtcccattcagtttgaatctgcttgggcactcactaacattgcttctgggacatcagaacaaaccaaggctgtggtagatggaggtgccatcccagcattcatttctctgttggcatctccccatgctcacatcagtgaacaagctgtctgggctctaggaaacattgcaggtgatggctcagtgttccgagacttggttattaagtacggtgcagttgacccactgttggctctccttgcagttcctgatatgtcatctttagcatgtggctacttacgtaatcttacctggacactttctaatctttgccgcaacaagaatcctgcacccccgatagatgctgttgagcagattcttcctaccttagttcggctcctgcatcatgatgatccagaagtattagcagatacctgctgggctatttcctaccttactgatggtccaaatgaacgaattggcatggtggtgaaaacaggagttgtgccccaacttgtgaagcttctaggagcttctgaattgccaattgtgactcctgccctaagagccatagggaatattgtcactggtacagatgaacagactcaggttgtgattgatgcaggagcactcgccgtctttcccagcctgctcaccaaccccaaaactaacattcagaaggaagctacgtggacaatgtcaaacatcacagccggccgccaggaccagatacagcaagttgtgaatcatggattagtcccattccttgtcagtgttctctctaaggcagattttaagacacaaaaggaagctgtgtgggccgtgaccaactataccagtggtggaacagttgaacagattgtgtaccttgttcactgtggcataatagaaccgttgatgaacctcttaactgcaaaagataccaagattattctggttatcctggatgccatttcaaatatctttcaggctgctgagaaactaggtgaaactgagaaacttagtataatgattgaagaatgtggaggcttagacaaaattgaagctctacaaaaccatgaaaatgagtctgtgtataaggcttcgttaagcttaattgagaagtatttctctgtagaggaagaggaagatcaaaacgttgtaccagaaactacctctgaaggctacactttccaagttcaggatggggctcctgggacctttaacttttagatcatgtagctgagacataaatttgttgtgtactacgtttggtattttgtcttattgtttctctactaagaactctttcttaaatgtggtttgttactgtagcactttttacactgaaactatacttgaacagttccaactgtacatacatactgtatgaagcttgtcctctgactaggtttctaatttctatgtggaatttcctatcttgcagcatcctgtaaataaacattcaagtccacccttttcttgacttcaaaaaaaaaaaaaaaaaaaaaaaaaaaaaaaa

SEQ ID NO: 22 - DNA, 6058 bp, Homo sapiens
  mRNA (1)..(6058): gi|24234749|ref|NM_012218.2| Homo sapiens interleukin enhancer binding factor 3, 90kDa (ILF3), transcript variant 1
cgcctgcccgcccgcccgctcgcccccggtccggactcctcctcctcctcttctcgccattgcagttggacccagcagcccggcgcgcaccgcgtggcttttgggggcagaccccggcgggctgtggcaggagggcggcggcggcggctgcggtcgaagaaggggacgccgacaagagttgaagtattgataacaccaaggaactctatcacaatttgaaaagataagcaaaagtttgatttccagacactacagaagaagtaaaaatgcgtccaatgcgaatttttgtgaatgatgaccgccatgtgatggcaaagcattcttccgtttatccaacacaagaggagctggaggcagtccagaacatggtgtcccacacggagcgggcgctcaaagctgtgtccgactggatagacgagcaggaaaagggtagcagcgagcaggcagagtccgataacatggatgtgcccccagaggacgacagtaaagaaggggctggggaacagaagacggagcacatgaccagaaccctgcggggagtgatgcgggtgggcctggtggcaaagggcctcctactcaagggggacttggatctggagctggtgctgctgtgtaaggagaagcccacaaccgccctcctggacaaggtggccgacaacctggccatccagcttgctgctgtaacagaagacaagtacgaaatactgcaatctgtcgacgatgctgcgattgtgataaaaaacacaaaagagcctccattgtccctgaccatccacctgacatcccctgttgtcagagaagaaatggagaaagtattagctggagaaacgctatcagtcaacgaccccccggacgttctggacaggcagaaatgccttgctgccttggcgtccctccgacacgccaagtggttccaggccagagccaacgggctgaagtcttgtgtcattgtgatccgggtcttgagggacctgtgcactcgcgtgcccacctggggtcccctccgaggctggcctctcgagctcctgtgtgagaaatccattggcacggccaacagaccgatgggtgctggcgaggccctgcggagagtgctggagtgcctggcgtcgggcatcgtgatgccagatggttctggcatttatgacccttgtgaaaaagaagccactgatgctattgggcatctagacagacagcaacgggaagatatcacacagagtgcgcagcacgcactgcggctcgctgccttcggccagctccataaagtcctaggcatggaccctctgccttccaagatgcccaagaaaccaaagaatgaaaacccagtggactacaccgttcagatcccaccaagcaccacctatgccattacgcccatgaaacgcccaatggaggaggacggggaggagaagtcgcccagcaaaaagaagaagaagattcagaagaaagaggagaaggcagagcccccccaggctatgaatgccctgatgcggttgaaccagctgaagccagggctgcagtacaagctggtgtcccagactgggcccgtccatgcccccatctttaccatgtctgtggaggttgatggcaattcattcgaggcctctgggccctccaaaaagacggccaagctgcacgtggccgttaaggtgttacaggacatgggcttgccgacgggtgctgaaggcagggactcgagcaagggggaggactcggctgaggagaccgaggcgaagccagcagtggtggcccctgccccagtggtagaagctgtctccacccctagtgcggcctttccctcagatgccactgccgagcaggggccgatcctgacaaagcacggcaagaacccagtcatggagctgaacgagaagaggcgtgggctcaagtacgagctcatctccgagaccgggggcagccacgacaagcgcttcgtcatggaggtcgaagtggatggacagaagttccaaggtgctggttccaacaaaaaggtggcgaaggcctacgctgctcttgctgccctagaaaagcttttccctgacacccctctcgcccttgatgccaacaaaaagaagagagccccagtacccgtcagagggggaccgaaatttgctgctaagccacataaccctggcttcggcatgggaggccccatgcacaacgaagtgcccccaccccccaaccttcgagggcggggaagaggcgggagcatccggggacgagggcgcgggcgaggatttggtggcgccaaccatggaggctacatgaatgccggtgctgggtatggaagctatgggtacggaggcaactcggcgacagcaggctacagtcagttctacagcaacggagggcattctgggaatgccagtggcggtggcggcgggggcggtggtggctcctccggctatggctcctactaccaaggtgacaactacaactcaccggtgcccccaaaacacgctgggaagaagcagccgcacgggggccagcagaagccctcctacggctcgggctaccagtcccaccagggccagcagcagtcctacaaccagagcccctacagcaactatggccctccacagggcaagcagaaaggctataaccatggacaaggcagctactcctactcgaactcctacaactctcccgggggcgggggcggatccgactacaactacgagagcaaattcaactacagtggtagtggaggccgaagcggcgggaacagctacggctcaggcggggcatcctacaacccagggtcacacgggggctacggcggaggttctgggggcggctcctcataccaaggcaaacaaggaggctactcacagtcgaactacaactccccggggtccggccagaactacagtggccctcccagctcctaccagtcctcacaaggcggctatggcagaaacgcagaccacagcatgaactaccagtacagataagcccccgcggggcggagatttctaccttctgcacttactccccatcagaagatcgagttttatgcatcacagttaacatgtcagctggccctccaggcccccgcccccatcccgtccacgttgctgtgtcgtgaggtgcagcgggtcaccctgtggcccgtcctgtgacccatatttagccgtgtttgggactccgtgtcttcaatggtttgttagttgccattacaactttgtctgggtagagtttttgagtttttgcagttcagtatccctctgtctattcacacttcgtgttagtggtaactcagtttgtctttaaatagttacagaagggatacgtcatttgttaatgcttttgtgaagtgagttaaacgagctttctgtattttaatgctttagtgtttcagttttataagtgaagattttattttaaaaaccagtgggaaagagtggggggtttctttttatgtctgggtcattcaggcagtacatctgaattaagctgaatgtagacaaataaagaaaaacaaaactgcgcccgtcttaggcctgggtgtctgacccaccagcagtgcaatgggcaggtttccccactctattcctgctcttgggaaagcagcgtgggccatcaggatggtccctggtccttagagagggtccagttcaggcttctagacattttactcatgctcagcgaaggctggttcctggtcccctgggctgtgtagacccggtgtcccaccaggctccaggctcccaccatctacagaggggcttacagcgcccattctggtcttggggaacccatcacaaaataggctttttctgctccccgattctggtgtagttctaagtacacagtgatgtcctctgtaggggcgtgcctgtggtggaacataacgcagttacaaaagaaagggcaggtgaggcctgggtaaccccagccatggaccgtcagtggctggagggagcttcgtgtctgtgctggagctgcagcctgctcgccatctggaggctcagtggagtggggagttggggttctcataccagcagatttccctagagcgtgattctcccatctgaggcaatcttgcctcccaggggaaattttgcaatgtttggaggatgttgtcacagctagtagcgggtgctctgggatctggtggatagatgccaaggatgctgtcaagcatactgtactgcccagaacagtggcccatagcagggacctgccctatcaaaatatcaggtgtatggaggtggagtcccaacgctagagcagcccttctcagctccaccctgcccggggagggaggaggagctctggtttcagagcagtgccgggattgcctttccccaggatctgtgtcggccatccaggaagaactgtactggccaagcctgggaccacacgtctgcagagatcctgctctgctggcctgagccccaggccttggcctcctgtgcttgggtaaccatggccactgggaaaagcaaggaccgtgtttgactttcttggagaggtgaaagaggtgaaagaacaagttgtgtgctagaaaacttttgaggaattcttatttgtgttagagcagaggaggtcccagataccaagtggcgcctcccaggaaaggctgggagaagaggtggcctggagtaccccgagatcccagcagcgcacacagtggagggatgaggatggatgggtcctaacccctgattttgatgggatgtgttcatgtcctatctcctctcctggacacattaaggggttgggacaagaagagactcctgtgagatcagcagacctcgtgtttaaggagagaatgcctgcctgcaacactcatggagagggacacttcctggccccacctgctaaatacctccaaactctgggcaggcgcctgcattctcaacacaggacttcccttaacagtttccggatcagtgaccaccaccacgttcaggtttctgaatgcagacccaccacgagggatggattccacccgcccgccctgctgcagatacatgcggcacagcaggcacgtgcctggagagaacagctcctgagcacagcacccttggagccctcaccccgctcacgatcctcaccagtgctgatgatgccgtcatgctgctggcctgagacagtatcccagctacaacaggacgacaccgggttcaggaatatgtggctatcaccttgagcactgacagtggccttccaggctagttgccttccaaacgcaggtagccgacctgcaggagggcctacaaacgggcccagcaagagctgggcaacagctggcttgtgaaatgagacaccttgaccaatatgctttgggtggacggtctcctacatgttcagtggaggccaccaggagcatccatgagcggggaaggggtccacacccttacatggcaagttgatacgatggggtgcttggtggatgggccatggaggtccgtgagctggaactgggcacacgccatcccagagggctcaggatgccccaggaaggaaagaagggcaacagactacacgattggacgtgtgtggttgactgggatgaagttggagggaggggcagggccttgcaggggattggtactgatcccagggaggaagtgttggggcttcatgaactaggatgaaaggaggcccctgagccatgacaaggggcacatccaggatttccgccaccctgaatttagtagagctagtaggccctggtcgtcactctgggcagggatgccgtcagccttgagggtcgccacccacctgtgtgttgccctctgtcctggcagggaaacatacaccccttgtctcaccaccaaccttgcttgtgtagtcagcagggctggccctgccccaaggactcactgcatgtacccggacccctaggcctggcctttgcagcatagttgggagcttctggattccatctgcacctgtgagccccatgctggctgtgcactgcgcgggcctgagactgctggatacaatgttgggcaacaactcagccagcctgatggcagcctcagaggcttactctaacccatcccagaataaatggagacttcatgtgttcattgtttcattcactcaa

SEQ ID NO: 23 - DNA, 2731 bp, Homo sapiens
  mRNA (1)..(2731): gi|31652260|ref|NM_002466.2| Homo sapiens v-myb myeloblastosis viral oncogene homolog (avian)-like 2 (MYBL2)
gcgcttggcgggagatagaaaagtgcttcaacccgcgccggcggcgactgcagttcctgcgagcgaggagcgcgggacctgctgacacgctgacgccttcgagcgcggcccggggcccggagcggccggagcagcccgggtcctgaccccggcccggctcccgctccgggctctgccggcgggcgggcgagcgcggcgcggtccgggccggggggatgtctcggcggacgcgctgcgaggatctggatgagctgcactaccaggacacagattcagatgtgccggagcagagggatagcaagtgcaaggtcaaatggacccatgaggaggacgagcagctgagggccctggtgaggcagtttggacagcaggactggaagttcctggccagccacttccctaaccgcactgaccagcaatgccagtacaggtggctgagagttttgaatccagaccttgtcaaggggccatggaccaaagaggaagaccaaaaagtcatcgagctggttaagaagtatggcacaaagcagtggacactgattgccaagcacctgaagggccggctggggaagcagtgccgtgaacgctggcacaaccacctcaaccctgaggtgaagaagtcttgctggaccgaggaggaggaccgcatcatctgcgaggcccacaaggtgctgggcaaccgctgggccgagatcgccaagatgttgccagggaggacagacaatgctgtgaagaatcactggaactctaccatcaaaaggaaggtggacacaggaggcttcttgagcgagtccaaagactgcaagcccccagtgtacttgctgctggagctcgaggacaaggacggcctccagagtgcccagcccacggaaggccagggaagtcttctgaccaactggccctccgtccctcctaccataaaggaggaggaaaacagtgaggaggaacttgcagcagccaccacatcgaaggaacaggagcccatcggtacagatctggacgcagtgcgaacaccagagcccttggaggaattcccgaagcgtgaggaccaggaaggctccccaccagaaacgagcctgccttacaagtgggtggtggaggcagctaacctcctcatccccgctgtgggttctagcctctctgaagccctggacttgatcgagtcggaccctgatgcttggtgtgacctgagtaaatttgacctccctgaggaaccatctgcagaggacagtatcaacaacagcctagtgcagctgcaagcgtcacatcagcagcaagtcctgccaccccgccagccttccgccctggtgcccagtgtgaccgagtaccgcctggatggccacaccatctcagacctgagccggagcagccggggcgagctgatccccatctcccccagcactgaagtcgggggctctggcattggcacaccgccctctgtgctcaagcggcagaggaagaggcgtgtggctctgtcccctgtcactgagaatagcaccagtctgtccttcctggattcctgtaacagcctcacgcccaagagcacacctgttaagaccctgcccttctcgccctcccagtttctgaacttctggaacaaacaggacacattggagctggagagcccctcgctgacatccaccccagtgtgcagccagaaggtggtggtcaccacaccactgcaccgggacaagacacccctgcaccagaaacatgctgcgtttgtaaccccagatcagaagtactccatggacaacactccccacacgccaaccccgttcaagaacgccctggagaagtacggacccctgaagcccctgccacagaccccgcacctggaggaggacttgaaggaggtgctgcgttctgaggctggcatcgaactcatcatcgaggacgacatcaggcccgagaagcagaagaggaagcctgggctgcggcggagccccatcaagaaagtccggaagtctctggctcttgacattgtggatgaggatgtgaagctgatgatgtccacactgcccaagtctctatccttgccgacaactgccccttcaaactcttccagcctcaccctgtcaggtatcaaagaagacaacagcttgctcaaccagggcttcttgcaggccaagcccgagaaggcagcagtggcccagaagccccgaagccacttcacgacacctgcccctatgtccagtgcctggaagacggtggcctgcggggggaccagggaccagcttttcatgcaggagaaagcccggcagctcctgggccgcctgaagcccagccacacatctcggaccctcatcttgtcctgaggtgttgagggtgtcacgagcccattctcatgtttacaggggttgtgggggcagagggggtctgtgaatctgagagtcattcaggtgacctcctgcagggagccttctgccaccagcccctccccagactctcaggtggaggcaacagggccatgtgctgccctgttgccgagcccagctgtgggcggctcctggtgctaacaacaaagttccacttccaggtctgcctggttccctccccaaggccacagggagctccgtcagcttctcccaagcccacgtcaggcctggcctcatctcagaccctgcttaggatgggggatgtggccaggggtgctcctgtgctcaccctctcttggtgcatttttttggaagaataaaattgcctctctcttaaaaaaaaaaaaaaaaaa

SEQ ID NO: 24 - DNA, 1688 bp, Homo sapiens
  mRNA (1)..(1688): gi|24430191|ref|NM_005557.2| Homo sapiens keratin 16 (focal non-epidermolytic palmoplantar keratoderma) (KRT16)
acagcacgctctcagccttcctgagcacctttccttctttcagccaactgctcactcgctcacctccctccttggcaccatgaccacctgcagccgccagttcacctcctccagctccatgaagggctcctgcggcatcggaggcggcatcgggggcggctccagccgcatctcctccgtcctggccggagggtcctgccgtgcccccagcacctacgggggcggcctgtctgtctcctctcgcttctcctctgggggagcctgcgggctggggggcggctatggcggtggcttcagcagcagcagcagctttggtagtggcttcgggggaggatatggtggtggccttggtgctggcttcggtggtggcttgggtgctggctttggtggtggttttgctggtggtgatgggcttctggtgggcagtgagaaggtgaccatgcagaacctcaatgaccgcctggcctcctacctggacaaggtgcgtgctctggaggaggccaacgccgacctggaagtgaagatccgtgactggtaccagaggcagcggcccagtgagatcaaagactacagtccctacttcaagaccatcgaggacctgaggaacaagatcattgcggccaccattgagaatgcgcagcccattttgcagattgacaatgccaggctggcagccgatgacttcaggaccaagtatgagcacgaactggccctgcggcagactgtggaggccgacgtcaatggcctgcgccgggtgttggatgagctgaccctggccaggactgacctggagatgcagatcgaaggcctgaaggaggagctggcctacctgaggaagaaccacgaggaggagatgcttgctctgagaggtcagaccggcggagatgtgaacgtggagatggatgctgcacctggcgtggacctgagccgcatcctgaatgagatgcgtgaccagtacgagcagatggcagagaaaaaccgcagagacgctgagacctggttcctgagcaagaccgaggagctgaacaaagaagtggcctccaacagcgaactggtacagagcagccgcagtgaggtgacggagctccggagggtgctccagggcctggagattgagctgcagtcccagctcagcatgaaagcatccctggagaacagcctggaggagaccaaaggccgctactgcatgcagctgtcccagatccagggactgattggcagtgtggaggagcagctggcccagctacgctgtgagatggagcagcagagccaggagtaccagatcttgctggatgtgaagacgcggctggagcaggagattgccacctaccgccgcctgctggagggcgaggatgcccacctttcctcccagcaagcatctggccaatcctattcttcccgcgaggtcttcacctcctcctcgtcctcttcgagccgtcagacccggcccatcctcaaggagcagagctcatccagcttcagccagggccagagctcctagaactgagctgcctctaccacagcctcctgcccaccagctggcctcacctcctgaaggcccgggtcaggaccctgctctcctggcgcagttcccagctatctcccctgctcctctgctggtggtgggctaataaagctgactttctggttgatgcaaaaaaaaaaaaaaaaaaaaaaaaaaaaaaaaa

SEQ ID NO: 25 - DNA, 1722 bp, Homo sapiens
  mRNA (1)..(1722): gi|22907048|ref|NM_000691.3| Homo sapiens aldehyde dehydrogenase 3 family, memberA1 (ALDH3A1)
ccaggagccccagttaccgggagaggctgtgtcaaaggcgccatgagcaagatcagcgaggccgtgaagcgcgcccgcgccgccttcagctcgggcaggacccgtccgctgcagttccggatccagcagctggaggcgctgcagcgcctgatccaggagcaggagcaggagctggtgggcgcgctggccgcagacctgcacaagaatgaatggaacgcctactatgaggaggtggtgtacgtcctagaggagatcgagtacatgatccagaagctccctgagtgggccgcggatgagcccgtggagaagacgccccagactcagcaggacgagctctacatccactcggagccactgggcgtggtcctcgtcattggcacctggaactaccccttcaacctcaccatccagcccatggtgggcgccatcgctgcagggaactcagtggtcctcaagccctcggagctgagtgagaacatggcgagcctgctggctaccatcatcccccagtacctggacaaggatctgtacccagtaatcaatgggggtgtccctgagaccacggagctgctcaaggagaggttcgaccatatcctgtacacgggcagcacgggggtggggaagatcatcatgacggctgctgccaagcacctgacccctgtcacgctggagctgggagggaagagtccctgctacgtggacaagaactgtgacctggacgtggcctgccgacgcatcgcctgggggaaattcatgaacagtggccagacctgcgtggcccctgactacatcctctgtgacccctcgatccagaaccaaattgtggagaagctcaagaagtcactgaaagagttctacggggaagatgctaagaaatcccgggactatggaagaatcattagtgcccggcacttccagagggtgatgggcctgattgagggccagaaggtggcttatgggggcaccggggatgccgccactcgctacatagcccccaccatcctcacggacgtggacccccagtccccggtgatgcaagaggagatcttcgggcctgtgctgcccatcgtgtgcgtgcgcagcctggaggaggccatccagttcatcaaccagcgtgagaagcccctggccctctacatgttctccagcaacgacaaggtgattaagaagatgattgcagagacatccagtggtggggtggcggccaacgatgtcatcgtccacatcaccttgcactctctgcccttcgggggcgtggggaacagcggcatgggatcctaccatggcaagaagagcttcgagactttctctcaccgccgctcttgcctggtgaggcctctgatgaatgatgaaggcctgaaggtcagataccccccgagcccggccaagatgacccagcactgaggaggggttgctccgcctggcctggccatactgtgtcccatcggagtgcggaccaccctcactggctctcctggccctgggagaatcgctcctgcagccccagcccagccccactcctctgctgacctgctgacctgtgcacaccccactcccacatgggcccaggcctcaccattccaagtctccacccctttctagaccaataaagagacgaatacaattttctaactcagcaaaaaaaaaaaaaaaaaaaaaaaaaaaaaaaaaaaaaaaaaaaaaaaaaaaaaaaaaaaaaaaaaaaaaaaaaaaaaaaaaaaa

SEQ ID NO: 26 - DNA, 3589 bp, Homo sapiens
  mRNA (1)..(3589): gi|68800242|ref|NM_001569.3| Homo sapiens interleukin-1 receptor-associated kinase 1 (IRAK1), transcript variant 1
cgcggacccggccggcccaggcccgcgcccgccgcggccctgagaggccccggcaggtcccggcccggcggcggcagccatggccggggggccgggcccgggggagcccgcagcccccggcgcccagcacttcttgtacgaggtgccgccctgggtcatgtgccgcttctacaaagtgatggacgccctggagcccgccgactggtgccagttcgccgccctgatcgtgcgcgaccagaccgagctgcggctgtgcgagcgctccgggcagcgcacggccagcgtcctgtggccctggatcaaccgcaacgcccgtgtggccgacctcgtgcacatcctcacgcacctgcagctgctccgtgcgcgggacatcatcacagcctggcaccctcccgccccgcttccgtccccaggcaccactgccccgaggcccagcagcatccctgcacccgccgaggccgaggcctggagcccccggaagttgccatcctcagcctccaccttcctctccccagcttttccaggctcccagacccattcagggcctgagctcggcctggtcccaagccctgcttccctgtggcctccaccgccatctccagccccttcttctaccaagccaggcccagagagctcagtgtccctcctgcagggagcccgcccctttccgttttgctggcccctctgtgagatttcccggggcacccacaacttctcggaggagctcaagatcggggagggtggctttgggtgcgtgtaccgggcggtgatgaggaacacggtgtatgctgtgaagaggctgaaggagaacgctgacctggagtggactgcagtgaagcagagcttcctgaccgaggtggagcagctgtccaggtttcgtcacccaaacattgtggactttgctggctactgtgctcagaacggcttctactgcctggtgtacggcttcctgcccaacggctccctggaggaccgtctccactgccagacccaggcctgcccacctctctcctggcctcagcgactggacatccttctgggtacagcccgggcaattcagtttctacatcaggacagccccagcctcatccatggagacatcaagagttccaacgtccttctggatgagaggctgacacccaagctgggagactttggcctggcccggttcagccgctttgccgggtccagccccagccagagcagcatggtggcccggacacagacagtgcggggcaccctggcctacctgcccgaggagtacatcaagacgggaaggctggctgtggacacggacaccttcagctttggggtggtagtgctagagaccttggctggtcagagggctgtgaagacgcacggtgccaggaccaagtatctgaaagacctggtggaagaggaggctgaggaggctggagtggctttgagaagcacccagagcacactgcaagcaggtctggctgcagatgcctgggctgctcccatcgccatgcagatctacaagaagcacctggaccccaggcccgggccctgcccacctgagctgggcctgggcctgggccagctggcctgctgctgcctgcaccgccgggccaaaaggaggcctcctatgacccaggtgtacgagaggctagagaagctgcaggcagtggtggcgggggtgcccgggcattcggaggccgccagctgcatccccccttccccgcaggagaactcctacgtgtccagcactggcagagcccacagtggggctgctccatggcagcccctggcagcgccatcaggagccagtgcccaggcagcagagcagctgcagagaggccccaaccagcccgtggagagtgacgagagcctaggcggcctctctgctgccctgcgctcctggcacttgactccaagctgccctctggacccagcacccctcagggaggccggctgtcctcagggggacacggcaggagaatcgagctgggggagtggcccaggatcccggcccacagccgtggaaggactggcccttggcagctctgcatcatcgtcgtcagagccaccgcagattatcatcaaccctgcccgacagaagatggtccagaagctggccctgtacgaggatggggccctggacagcctgcagctgctgtcgtccagctccctcccaggcttgggcctggaacaggacaggcaggggcccgaagaaagtgatgaatttcagagctgatgtgttcacctgggcagatcccccaaatccggaagtcaaagttctcatggtcagaagttctcatggtgcacgagtcctcagcactctgccggcagtgggggtgggggcccatgcccgcgggggagagaaggaggtggccctgctgttctaggctctgtgggcataggcaggcagagtggaaccctgcctccatgccagcatctgggggcaaggaaggctggcatcatccagtgaggaggctggcgcatgttgggaggctgctggctgcacagacccgtgaggggaggagaggggctgctgtgcaggggtgtggagtagggagctggctcccctgagagccatgcagggcgtctgcagcccaggcctctggcagcagctctttgcccatctctttggacagtggccaccctgcacaatggggccgacgaggcctagggccctcctacctgcttacaatttggaaaagtgtggccgggtgcggtggctcacgcctgtaatcccagcactttgggaggccaaggcaggaggatcgctggagcccagtaggtcaagaccagccagggcaacatgatgagaccctgtctctgccaaaaaattttttaaactattagcctggcgtggtagcgcacgcctgtggtcccagctgctggggaggctgaagtaggaggatcatttatgcttgggaggtcgaggctgcagtgagtcatgattgtatgactgcactccagcctgggtgacagagcaagaccctgtttcaaaaagaaaaaccctgggaaaagtgaagtatggctgtaagtctcatggttcagtcctagcaagaagcgagaattctgagatcctccagaaagtcgagcagcacccacctccaacctcgggccagtgtcttcaggctttactggggacctgcgagctggcctaatgtggtggcctgcaagccaggccatccctgggcgccacagacgagctccgagccaggtcaggcttcggaggccacaagctcagcctcaggcccaggcactgattgtggcagaggggccactacccaaggtctagctaggcccaagacctagttacccagacagtgagaagcccctggaaggcagaaaagttgggagcatggcagacagggaagggaaacattttcagggaaaagacatgtatcacatgtcttcagaagcaagtcaggtttcatgtaaccgagtgtcctcttgcgtgtccaaaagtagcccagggctgtagcacaggcttcacagtgattttgtgttcagccgtgagtcacactacatgcccccgtgaagctgggcattggtgacgtccaggttgtccttgagtaataaaaacgtatgttgcaataaaaaaaaaaaaaaaaaa

SEQ ID NO: 27 - DNA, 3360 bp, Homo sapiens
  mRNA (1)..(3360): gi|69354731|ref|NM_001090.2| Homo sapiens ATP-binding cassette, sub-family F (GCN20), member 1 (ABCF1), transcript variant 2
gcgccagcttggagagccagccccatcggggttccccgccgccggaagcggaaatagcaccgggcgccgccacagtagctgtaactgccaccgcgatgccgaaggcgcccaagcagcagccgccggagcccgagtggatcggggacggagagagcacgagcccatcagacaaagtggtgaagaaagggaagaaggacaagaagatcaaaaaaacgttctttgaagagctggcagtagaagataaacaggctggggaagaagagaaagtgctcaaggagaaggagcagcagcagcagcaacagcaacagcagcaaaaaaaaaagcgagatacccgaaaaggcaggcggaagaaggatgtggatgatgatggagaagagaaagagctcatggagcgtcttaagaagctctcagtgccaaccagtgatgaggaggatgaagtacccgccccaaaaccccgcggagggaagaaaaccaagggtggtaatgtttttgcagccctgattcaggatcagagtgaggaagaggaggaggaagaaaaacatcctcctaagcctgccaagccggagaagaatcggatcaataaggccgtatctgaggaacagcagcctgcactcaagggcaaaaagggaaaggaagagaagtcaaaagggaaggctaagcctcaaaataaattcgctgctctggacaatgaagaggaggataaagaagaagaaattataaaggaaaaggagcctcccaaacaagggaaggagaaggccaagaaggcagagcagatggagtatgagcgccaagtggcttcattaaaagcagccaatgcagctgaaaatgacttctccgtgtcccaggcggagatgtcctcccgccaagccatgttagaaaatgcatctgacatcaagctggagaagttcagcatctccgctcatggcaaggagctgttcgtcaatgcagacctgtacattgtagccggccgccgctacgggctggtaggacccaatggcaagggcaagaccacactcctcaagcacattgccaaccgagccctgagcatccctcccaacattgatgtgttgctgtgtgagcaggaggtggtagcagatgagacaccagcagtccaggctgttcttcgagctgacaccaagcgattgaagctgctggaagaggagcggcggcttcagggacagctggaacaaggggatgacacagctgctgagaggctagagaaggtgtatgaggaattgcgggccactggggcggcagctgcagaggccaaagcacggcggatcctggctggcctgggctttgaccctgaaatgcagaatcgacccacacagaagttctcagggggctggcgcatgcgtgtctccctggccagggcactgttcatggagcccacactgctgatgctggatgagcccaccaaccacctggacctcaacgctgtcatctggcttaataactacctccagggctggcggaagaccttgctgatcgtctcccatgaccagggcttcttggatgatgtctgcactgatatcatccacctcgatgcccagcggctccactactataggggcaattacatgaccttcaaaaagatgtaccagcagaagcagaaagaactgctgaaacagtatgagaagcaagagaaaaagctgaaggagctgaaggcaggcgggaagtccaccaagcaggcggaaaaacaaacgaaggaagccctgactcggaagcagcagaaatgccgacggaaaaaccaagatgaggaatcccaggaggcccctgagctcctgaagcgccctaaggagtacactgtgcgcttcacttttccagaccccccaccactcagccctccagtgctgggtctgcatggtgtgacattcggctaccagggacagaaaccactctttaagaacttggattttggcatcgacatggattcaaggatttgcattgtgggccctaatggtgtggggaagagtacgctactcctgctgctgactggcaagctgacaccgacccatggggaaatgagaaagaaccaccggctgaaaattggcttcttcaaccagcagtatgcagagcagctgcgcatggaggagacgcccactgagtacctgcagcggggcttcaacctgccctaccaggatgcccgcaagtgcctgggccgcttcggcctggagagtcacgcccacaccatccagatctgcaaactctctggtggtcagaaggcgcgagttgtgtttgctgagctggcctgtcgggaacctgatgtcctcatcttggacgagccaaccaataacctggacatagagtctattgatgctctaggggaggccatcaatgaatacaagggtgctgtgatcgttgtcagccatgatgcccgactcatcacagaaaccaattgccagctgtgggtggtggaggagcagagtgttagccaaatcgatggtgactttgaagactacaagcgggaggtgttggaggccctgggtgaagtcatggtcagccggccccgagagtgagctttccttcccagaagtctcccgagagacatatttgtgtggcctagaagtcctctgtggtctcccctcctctgaagactgcctctggcctgcagctgacctggcaaccattcaggcacatgaaggtggagtgtgaccttgatgtgaccgggatcccactctgattgcatccatttctctgaaagacttgtttgttctgcttctcttcatataactgagctggccttatccttggcatccccctaaacaaacaagaggtgaccaccttattgtgaggttccatccagccaagtttatgtggcctattgtctcaggactctcatcactcagaagcctgcctctgatttaccctacagcttcaggcccagctgccccccagtctttgggtggtgctgttcttttctggtggatttaatgctgactcactggtacaaacagctgttgaagctcagagctggaggtgagcttctgaggcctttgccattatccagcccaagatttggtgcctgcagcctcttgtctggttgaggacttggggcaggaaaggaatgctgctgaacttgaatttccctttacaaggggaagaaataaaggaaaggagttgctgccgacctgtcactgtttggagattgatgggagttggaactgttctcagtcttgatttgctttattcagttttctagcagcttttaatagtcccctcttccccactaaatggatcttgtttgcagtcttgctgacagtgtttgctgtttaaggatcataggattcctttcccccaacccttcacgcaaggaaaaagcaaagtgattcataccttctatcttggaaaaaaaaaaaa

SEQ ID NO: 28 - DNA, 3919 bp, Homo sapiens
  mRNA (1)..(3919): gi|41584201|ref|NM_201524.1| Homo sapiens G protein-coupled receptor 56 (GPR56), transcript variant 2
cgcactagctgtctgccctgccctgccgtaggagatgggctgggagcctcccacgctctccagctcactcggcaggcagcggggaccagggctggcaggttaagcctctgggggtggatcctgaaaggtggtccagccgcctggccctgcgtgggaccctccacctggcagcagacagggtctcgctctgtcacacaggctggagtgcagtggtgtgatcttggctcatcgtaacctccacctcccgggttcaagtgattctcatgcctcagcctcccgagtagctgggattacaggtggtgacttccaagagtgactccgtcggaggaaaatgactccccagtcgctgctgcagacgacactgttcctgctgagtctgctcttcctggtccaaggtgcccacggcaggggccacagggaagactttcgcttctgcagccagcggaaccagacacacaggagcagcctccactacaaacccacaccagacctgcgcatctccatcgagaactccgaagaggccctcacagtccatgcccctttccctgcagcccaccctgcttcccgatccttccctgaccccaggggcctctaccacttctgcctctactggaaccgacatgctgggagattacatcttctctatggcaagcgtgacttcttgctgagtgacaaagcctctagcctcctctgcttccagcaccaggaggagagcctggctcagggccccccgctgttagccacttctgtcacctcctggtggagccctcagaacatcagcctgcccagtgccgccagcttcaccttctccttccacagtcctccccacacggccgctcacaatgcctcggtggacatgtgcgagctcaaaagggacctccagctgctcagccagttcctgaagcatccccagaaggcctcaaggaggccctcggctgcccccgccagccagcagttgcagagcctggagtcgaaactgacctctgtgagattcatgggggacatggtgtccttcgaggaggaccggatcaacgccacggtgtggaagctccagcccacagccggcctccaggacctgcacatccactcccggcaggaggaggagcagagcgagatcatggagtactcggtgctgctgcctcgaacactcttccagaggacgaaaggccggagcggggaggctgagaagagactcctcctggtggacttcagcagccaagccctgttccaggacaagaattccagccaagtcctgggtgagaaggtcttggggattgtggtacagaacaccaaagtagccaacctcacggagcccgtggtgctcactttccagcaccagctacagccgaagaatgtgactctgcaatgtgtgttctgggttgaagaccccacattgagcagcccggggcattggagcagtgctgggtgtgagaccgtcaggagagaaacccaaacatcctgcttctgcaaccacttgacctactttgcagtgctgatggtctcctcggtggaggtggacgccgtgcacaagcactacctgagcctcctctcctacgtgggctgtgtcgtctctgccctggcctgccttgtcaccattgccgcctacctctgctccaggaggaaacctcgggactacaccatcaaggtgcacatgaacctgctgctggccgtcttcctgctggacacgagcttcctgctcagcgagccggtggccctgacaggctctgaggctggctgccgagccagtgccatcttcctgcacttctccctgctcacctgcctttcctggatgggcctcgaggggtacaacctctaccgactcgtggtggaggtctttggcacctatgtccctggctacctactcaagctgagcgccatgggctggggcttccccatctttctggtgacgctggtggccctggtggatgtggacaactatggccccatcatcttggctgtgcataggactccagagggcgtcatctacccttccatgtgctggatccgggactccctggtcagctacatcaccaacctgggcctcttcagcctggtgtttctgttcaacatggccatgctagccaccatggtggtgcagatcctgcggctgcgcccccacacccaaaagtggtcacatgtgctgacactgctgggcctcagcctggtccttggcctgccctgggccttgatcttcttctcctttgcttctggcaccttccagcttgtcgtcctctaccttttcagcatcatcacctccttccaaggcttcctcatcttcatctggtactggtccatgcggctgcaggcccggggtggcccctcccctctgaagagcaactcagacagcgccaggctccccatcagctcgggcagcacctcgtccagccgcatctaggcctccagcccacctgcccatgtgatgaagcagagattcggcctcgtcgcacactgcctgtggcccccgagcccggcccagccccaggccagtcagccgcagactttggaaagcccaacgaccatggagagatgggccgttgccatggtggacggactcccgggctgggcttttgaattggccttggggactactcggctctcactcagctcccacgggactcagaagtgcgccgccatgctgcctagggtactgtccccacatctgtcccaacccagctggaggcctggtctctccttacaacccctgggcccagccctcattgctgggggccaggccttggatcttgagggtctggcacatccttaatcctgtgcccctgcctgggacagaaatgtggctccagttgctctgtctctcgtggtcaccctgagggcactctgcatcctctgtcattttaacctcaggtggcacccagggcgaatggggcccagggcagaccttcagggccagagccctggcggaggagaggccctttgccaggagcacagcagcagctcgcctacctctgagcccaggccccctccctccctcagccccccagtcctccctccatcttccctggggttctcctcctctcccagggcctccttgctccttcgttcacagctgggggtccccgattccaatgctgttttttggggagtggtttccaggagctgcctggtgtctgctgtaaatgtttgtctactgcacaagcctcggcctgcccctgagccaggctcggtaccgatgcgtgggctgggctaggtccctctgtccatctgggcctttgtatgagctgcattgcccttgctcaccctgaccaagcacacgcctcagaggggccctcagcctctcctgaagccctcttgtggcaagaactgtggaccatgccagtcccgtctggtttccatcccaccactccaaggactgagactgacctcctctggtgacactggcctagggcctgacactctcctaagaggttctctccaagcccccaaatagctccaggcgccctcggccgcccatcatggttaattctgtccaacaaacacacacgggtagattgctggcctgttgtaggtggtagggacacagatgaccgacctggtcactcctcctgccaacattcagtctggtatgtgaggcgtgcgtgaagcaagaactcctggagctacagggacagggagccatcattcctgcctgggaatcctggaagacttcctgcaggagtcagcgttcaatcttgaccttgaagatgggaaggatgttctttttacgtaccaattcttttgtcttttgatattaaaaagaagtacatgttcattgtagagaatttggaaactgtagaagagaatcaagaagaaaaataaaaatcagctgttgtaatcacctagcaaactggaaaaaaaaaaaaaaaaaaaaaaaaaaaaaaaaaaaaaaaaaaaaaaaaaaaaaaaaaaaaaaaaaaaaaaaaaa

SEQ ID NO: 29 - DNA, 5831 bp, Homo sapiens
  mRNA (1)..(5831): gi|4504950|ref|NM_002291.1| Homo sapiens laminin, beta 1 (LAMB1)
gggacctggaagcgccccagccccgcagcgatcgcagattcggctttcaaacaaaagaggcgccccggggggtgggaccgggacctcacccggtcctcgcagagttgcggccgcccgccccttcagccccggctctccgtatgcgcatgagcagaggcgcctccctctgttcctcccaaggctaaactttctaattcccttctttgggctcgggggctcccggagcagggcgagagctcgcgtcgccggaaaggaagacgggaagaaagggcaggcggctcggcgggcgtcttctccactcctctgccgcgtccccgtggctgcagggagccggcatggggcttctccagttgctagctttcagtttcttagccctgtgcagagcccgagtgcgcgctcaggaacccgagttcagctacggctgcgcagaaggcagctgctatcccgccacgggcgaccttctcatcggccgagcacagaagctttcggtgacctcgacgtgcgggctgcacaagcccgaaccctactgtatcgtcagccacttgcaggaggacaaaaaatgcttcatatgcaattcccaagatccttatcatgagaccctgaatcctgacagccatctcattgaaaatgtggtcactacatttgctccaaaccgccttaagatttggtggcaatctgaaaatggtgtggaaaatgtaactatccaactggatttggaagcagaattccattttactcatctcataatgactttcaagacattccgtccagctgctatgctgatagaacgatcgtccgactttgggaaaacctggggtgtgtatagatacttcgcctatgactgtgaggcctcgtttccaggcatttcaactggccccatgaaaaaagtcgatgacataatttgtgattctcgatattctgacattgaaccctcaactgaaggagaggtgatatttcgtgctttagatcctgctttcaaaatagaagatccttatagcccaaggatacagaatttattaaaaattaccaacttgagaatcaagtttgtgaaactgcatactttgggagataaccttctggattccaggatggaaatcagagaaaagtattattatgcagtttatgatatggtggttcgaggaaattgcttctgctatggtcatgccagcgaatgtgcccctgtggatggattcaatgaagaagtggaaggaatggttcacggacactgcatgtgcaggcataacaccaagggcttaaactgtgaactctgcatggatttctaccatgatttaccttggagacctgctgaaggccgaaacagcaacgcctgtaaaaaatgtaactgcaatgaacattccatctcttgtcactttgacatggctgtttacctggccacggggaacgtcagcggaggcgtgtgtgatgactgtcagcacaacaccatggggcgcaactgtgagcagtgcaagccgttttactaccagcacccagagagggacatccgagatcctaatttctgtgaacgatgtacgtgtgacccagctggctctcaaaatgagggaatttgtgacagctatactgatttttctactggtctcattgctggccagtgtcggtgtaaattaaatgtggaaggagaacattgtgatgtttgcaaagaaggcttctatgatttaagcagtgaagatccatttggttgtaaatcttgtgcttgcaatcctctgggaacaattcctggagggaatccttgtgattccgagacaggtcactgctactgcaagcgtctggtgacaggacagcattgtgaccagtgcctgccagagcactggggcttaagcaatgatttggatggatgtcgaccatgtgactgtgaccttgggggagccttaaacaacagttgctttgcggagtcaggccagtgctcatgccggcctcacatgattggacgtcagtgcaacgaagtggaacctggttactactttgccaccctggatcactacctctatgaagcggaggaagccaacttggggcctggggttagcatagtggagcggcaatatatccaggaccggattccctcctggactggagccggcttcgtccgagtgcctgaaggggcttatttggagtttttcattgacaacataccatattccatggagtacgacatcctaattcgctacgagccacagctacccgaccactgggaaaaagctgtcatcacagtgcagcgacctggaaggattccaaccagcagccgatgtggtaataccatccccgatgatgacaaccaggtggtgtcattatcaccaggctcaagatatgtcgtccttcctcggccggtgtgctttgagaagggaacaaactacacggtgaggttggagctgcctcagtacacctcctctgatagcgacgtggagagcccctacacgctgatcgattctcttgttctcatgccatactgtaaatcactggacatcttcaccgtgggaggttcaggagatggggtggtcaccaacagtgcctgggaaacctttcagagataccgatgtctagagaacagcagaagcgttgtgaaaacaccgatgacagatgtttgcagaaacatcatctttagcatttctgccctgttacaccagacaggcctggcttgtgaatgcgaccctcagggttcgttaagttccgtgtgtgatcccaacggaggccagtgccagtgccggcccaacgtggttggaagaacctgcaacagatgtgcacctggaacttttggctttggccccagtggatgcaaaccttgtgagtgccatctgcaaggatctgtcaatgccttctgcaatcccgtcactggccagtgccactgtttccagggagtgtatgctcggcagtgtgatcggtgcttacctgggcactggggctttccaagttgccagccctgccagtgcaatggccacgccgatgactgcgacccagtgactggggagtgcttgaactgccaggactacaccatgggtcataactgtgaaaggtgcttggctggttactatggcgaccccatcattgggtcaggtgatcactgccgcccttgcccttgcccagatggtcccgacagtggacgccagtttgccaggagctgctaccaagatcctgttactttacagcttgcctgtgtttgtgatcctggatacattggttccagatgtgacgactgtgcctcaggatactttggcaatccatcagaagttggggggtcgtgtcagccttgccagtgtcacaacaacattgacacgacagacccagaagcctgtgacaaggagactgggaggtgtctcaagtgcctgtaccacacggaaggggaacactgtcagttctgccggtttggatactatggtgatgccctccggcaggactgtcgaaagtgtgtctgtaattacctgggcaccgtgcaagagcactgtaacggctctgactgccagtgcgacaaagccactggtcagtgcttgtgtcttcctaatgtgatcgggcagaactgtgaccgctgtgcgcccaatacctggcagctggccagtggcactggctgtgacccatgcaactgcaatgctgctcattccttcgggccatcttgcaatgagttcacggggcagtgccagtgcatgcctgggtttggaggccgcacctgcagcgagtgccaggaactcttctggggagaccccgacgtggagtgccgagcctgtgactgtgaccccaggggcattgagacgccacagtgtgaccagtccacgggccagtgtgtctgcgttgagggtgttgagggtccacgctgtgacaagtgcacgcgagggtactcgggggtcttccctgactgcacaccctgccaccagtgctttgctctctgggatgtgatcattgccgagctgaccaacaggacacacagattcctggagaaagccaaggccttgaagatcagtggtgtgatcgggccttaccgtgagactgtggactcggtggagaggaaagtcagcgagataaaagacatcctggcgcagagccccgcagcagagccactgaaaaacattgggaatctctttgaggaagcagagaaactgattaaagatgttacagaaatgatggctcaagtagaagtgaaattatctgacacaacttcccaaagcaacagcacagccaaagaactggattctctacagacagaagccgaaagcctagacaacactgtgaaagaacttgctgaacaactggaatttatcaaaaactcagatattcggggtgccttggatagcattaccaagtatttccagatgtctcttgaggcagaggagagggtgaatgcctccaccacagaacccaacagcactgtggagcagtcagccctcatgagagacagagtagaagacgtgatgatggagcgagaatcccagttcaaggaaaaacaagaggagcaggctcgcctccttgatgaactggcaggcaagctacaaagcctagacctttcagccgctgccgaaatgacctgtggaacacccccaggggcctcctgttccgagactgaatgtggcgggccaaactgcagaactgacgaaggagagaggaagtgtggggggcctggctgtggtggtctggttactgttgcacacaacgcctggcagaaagccatggacttggaccaagatgtcctgagtgccctggctgaagtggaacagctctccaagatggtctctgaagcaaaactgagggcagatgaggcaaaacaaagtgctgaagacattctgttgaagacaaatgctaccaaagaaaaaatggacaagagcaatgaggagctgagaaatctaatcaagcaaatcagaaactttttgacccaggatagtgctgatttggacagcattgaagcagttgctaatgaagtattgaaaatggagatgcctagcaccccacagcagttacagaacttgacagaagatatacgtgaacgagttgaaagcctttctcaagtagaggttattcttcagcatagtgctgctgacattgccagagctgagatgttgttagaagaagctaaaagagcaagcaaaagtgcaacagatgttaaagtcactgcagatatggtaaaggaagctctggaagaagcagaaaaggcccaggtcgcagcagagaaggcaattaaacaagcagatgaagacattcaaggaacccagaacctgttaacttcgattgagtctgaaacagcagcttctgaggaaaccttgttcaacgcgtcccagcgcatcagcgagttagagaggaatgtggaagaacttaagcggaaagctgcccaaaactccggggaggcagaatatattgaaaaagtagtatatactgtgaagcaaagtgcagaagatgttaagaagactttagatggtgaacttgatgaaaagtataaaaaagtagaaaatttaattgccaaaaaaactgaagagtcagctgatgccagaaggaaagccgaaatgctacaaaatgaagcaaaaactcttttagctcaagcaaatagcaagctgcaactgctcaaagatttagaaagaaaatatgaagacaatcaaagatacttagaagataaagctcaagaattagcaagactggaaggagaagtccgttcactcctaaaggatataagccagaaagttgctgtgtatagcacatgcttgtaacagaggagaataaaaaatggctgaggtgaacaaggtaaaacaactacattttaaaaactgacttaatgctcttcaaaataaaacatcacctatttaatgtttttaatcacattttgtatgagttaaataaagccc

SEQ ID NO: 30 - DNA, 3490 bp, Homo sapiens
  mRNA (1)..(3490): gi|4504810|ref|NM_002230.1| Homo sapiens junction plakoglobin (JUP), transcript variant 1
cgccagagtccggagcagccgccgcccgaccgcgccgagctcagttcgctgtccgcgccggctcccaccccggcccgaccccgacccggcccggtcaggccccatactcagtagccacgatggaggtgatgaacctgatggagcagcctatcaaggtgactgagtggcagcagacatacacctacgactcgggtatccactcgggcgccaacacctgcgtgccctccgtcagcagcaagggcatcatggaggaggatgaggcctgcgggcgccagtacacgctcaagaaaaccaccacttacacccagggggtgccccccagccaaggtgacctggagtaccagatgtccacaacagccagggccaaacgggtgcgggaggccatgtgccctggtgtgtcaggcgaggacagctcgcttctgctggccacccaggtggaggggcaggccaccaacctgcagcgactggccgagccgtcccagctgctcaagtcggccattgtgcatctcatcaactaccaggacgatgccgagctggccactcgcgccctgcccgagctcaccaaactgctcaacgacgaggacccggtggtggtgaccaaggcggccatgattgtgaaccagctgtcgaagaaggaggcgtcgcggcgggccctgatgggctcgccccagctggtggccgctgtcgtgcgtaccatgcagaataccagcgacctggacacagcccgctgcaccaccagcatcctgcacaacctctcccaccaccgggaggggctgctcgccatcttcaagtcgggtggcatccctgctctggtccgcatgctcagctcccctgtggagtcggtcctgttctatgccatcaccacgctgcacaacctgctcctgtaccaggagggcgccaagatggccgtgcgcctggccgacgggctgcaaaagatggtgcccctgctcaacaagaacaaccccaagttcctggccatcaccaccgactgcctgcagctcctggcctacggcaaccaggagagcaagctgatcatcctggccaatggtgggccccaggccctcgtgcagatcatgcgtaactacagttatgaaaagctgctctggaccaccagtcgtgtgctcaaggtgctatccgtgtgtcccagcaataagcctgccattgtggaggctggtgggatgcaggccctgggcaagcacctgaccagcaacagcccccgcctggtgcagaactgcctgtggaccctgcgcaacctctcagatgtggccaccaagcaggagggcctggagagtgtgctgaagattctggtgaatcagctgagtgtggatgacgtcaacgtcctcacctgtgccacgggcacactctccaacctgacatgcaacaacagcaagaacaagacgctggtgacacagaacagcggtgtggaggctctcatccatgccatcctgcgtgctggtgacaaggacgacatcacggagcctgccgtctgcgctctgcgccacctcactagccgccaccctgaggccgagatggcccagaactctgtgcgtctcaactatggcatcccagccatcgtgaagctgctcaaccagcccaaccagtggccactggtcaaggcaaccatcggcttgatcaggaatctggccctgtgcccagccaaccatgccccgctgcaggaggcagcggtcatcccccgcctcgtccaactgctggtgaaggcccaccaggatgcccagcgccacgtagctgcaggcacacagcagccctacacggatggtgtgaggatggaggagattgtggagggctgcaccggagcactgcacatcctcgcccgggaccccatgaaccgcatggagatcttccggctcaacaccattcccctgtttgtgcagctcctgtactcgtcggtggagaacatccagcgcgtggctgccggggtgctgtgtgagctggcccaggacaaggaggcggccgacgccattgatgcagagggggcctcggccccactcatggagttgctgcactcccgcaacgagggcactgccacctacgctgctgccgtcctgttccgcatctccgaggacaagaacccagactaccggaagcgcgtgtccgtggagctcaccaactccctcttcaagcatgacccggctgcctgggaggctgcccagagcatgattcccatcaatgagccctatggagatgacatggatgccacctaccgccccatgtactccagcgatgtgccccttgacccgctggagatgcacatggacatggatggagactaccccatcgacacctacagcgacggcctcaggcccccgtaccccactgcagaccacatgctggcctaggcggcctggccccagtgacggccccctctttgcaggcttttcctcctctctagaacctccttctgttggaggccctcccatctccccgctgaaacctgcgctccttttttggggggatcctttgctgctgagcttccccaagcacggtgtgccctggcctgccttcttcttgtgtctttggtggggatggggaggcctattcctgctggccccttctgggggtggtgggcaggtgacacggagtggcttgagcttctggggatgcaggtccaccgagcccctgacccctgtctgtccccgctcccctaacaggtgcggttcctcatctgagaggctctccgtgcaggcgatggggcaagacagaaaagtgcctgagctggggaagccggggtgtaacttcctgctgcaccctgcgcctccagaggtcctccgtagggtctttcttgggatagtgttctgctcctgcttttctgtcctgggcatgggtccagggcctgacaccccctccccgcccctgtggccctggccactaaagcttcagactcaagtacccattctgttttcccccagcaacgcccctccaaacctccagcctccctgtctccagctgcctgggcccggaagggctttggttccttctctgggtctgattttctcactgaactccaccgaccaactgccctaagcccccagggcctccagggcccaggttcgagacccaaacccccaaaatccaaaacttctcttgaaaagttcagggaccgtccaggggagatggggaggagatatggagtgagtcacctgctccagaagatgccagcttctctctccagggtgcttagttggctttgcccacccctcactccccagggagctccggggacagcttcctcacacccctgtcccacccacacagctgccctagctgaccccgagaagtgctcttggctgacccctctggtgtgtggtgaggggctttctcttccccttcctgtttcagacccccccatttcccgcacatggtgtggggggctgggggaggtccaagcagagtgttttattattatcgctttatgtttttggttattggtttttttgtatagaccaaagcaaagaaaataaaaataacacag

SEQ ID NO: 31 - DNA, 3344 bp, Homo sapiens
  mRNA (1)..(3344): gi|4501840|ref|NM_001605.1| Homo sapiens alanyl-tRNA synthetase (AARS)
ggtacagctgcgcgtctgcgggaataggtgcagcgggcccttggcgggggactctgagggaggagctggggacggcgaccctaggagagttctttggggtgactttcaagatggactctactctaacagcaagtgaaatccggcagcgatttatagatttcttcaagaggaacgagcatacgtatgttcactcgtctgccaccatcccattggatgaccccactttgctctttgccaatgcaggcatgaaccagtttaaacccattttcctgaacacaattgacccatctcaccccatggcaaagctgagcagagctgccaatacccagaagtgcatccgggctgggggcaaacaaaatgacctggacgatgtgggcaaggatgtctatcatcacaccttcttcgagatgctgggctcttggtcttttggagattactttaaggaattggcatgtaagatggctctggaactcctcacccaagagtttggcattcccattgaaagactttatgttacttactttggcggggatgaagcagctggcttagaagcagatctggaatgcaaacagatctggcaaaatttggggctggatgacaccaaaatcctcccaggcaacatgaaggataacttctgggagatgggtgacacgggcccctgtggtccttgcagtgagatccactacgaccggattggtggtcgggacgccgcacatcttgtcaaccaggacgaccctaatgtgctggagatctggaaccttgtgttcatccagtataacagggaagctgatggcattctgaaacctcttcccaagaaaagcattgacacagggatgggcctggaacgactggtatctgtgctgcagaataagatgtccaactatgacactgacctttttgtcccttactttgaagccattcagaagggcacaggtgcccgaccatacactgggaaagttggtgctgaggatgccgatgggattgacatggcctaccgggtgctggctgaccatgctcggaccatcactgtggcactggctgatggtggccggcctgacaacacagggcgtggatatgtgttgagacggattctccgccgagctgtccgatacgcccatgaaaagctcaatgccagcaggggcttctttgctacgttagtggatgttgtcgtccagtccctgggagatgcatttcctgagctgaagaaggacccagacatggtgaaggacatcattaatgaagaagaggtgcagtttctcaagactctcagcagagggcgtcgcatcctggacaggaaaattcagagcctgggagacagcaagaccattcccggagacactgcttggctcctctatgacacctatgggtttccagtggatctgactggactgattgctgaagagaagggcctggtggtagacatggatggctttgaagaggagaggaaactggcccagctgaaatcacagggcaagggagctggtggggaagacctcattatgctggacatttacgctatcgaagagctccgggcacggggtctggaggtcacagatgattccccaaagtacaattaccatttggactccagtggtagctatgtatttgagaacacagtggctacggtgatggctctgcgcagggagaagatgttcgtggaagaggtgtccacaggccaggagtgtggagtggtgctggacaagacctgtttctatgctgagcaaggaggccagatctatgacgaaggctacctggtgaaggtggatgacagcagtgaagataaaacagagtttacagtgaagaatgctcaggtccgaggagggtatgtgctacacattggaaccatctacggtgacctgaaagtgggggatcaggtctggctgtttattgatgagccccgacgaagacccatcatgagcaaccacacagctacgcacattctgaacttcgccctgcgctcagtgcttggggaagctgaccagaaaggctcattggttgctcctgaccgcctcagatttgactttactgccaagggagccatgtccacccaacagatcaagaaggctgaagagattgctaatgagatgattgaggcagccaaggccgtctatacccaggattgccccctggcagcagcgaaagccatccagggcctacgggctgtgtttgatgagacctatcctgaccctgtgcgagtcgtctccattggggtcccggtgtccgagttgctggatgacccctctgggcctgctggctccctgacttctgttgagttctgtgggggaacgcacctgcggaactcgagtcatgcaggagcttttgtgatcgtgacggaagaagccattgccaagggtatccggaggattgtggctgtcacaggtgccgaggcccagaaggccctcaggaaagcagagagcttgaagaaatgtctctctgtcatggaagccaaagtgaaggctcagactgctccaaacaaggatgtgcagagggagatcgctgaccttggagaggccctggccactgcagtcatcccccagtggcagaaggatgaattgcgggagactctcaaatccctaaagaaggtcatggatgacttggaccgagccagcaaagccgatgtccagaaacgagtgttagagaagacgaagcagttcatcgacagcaaccccaaccagcctcttgtcatcctggagatggagagcggcgcctcagccaaggccctgaatgaagccttgaagctcttcaagatgcactcccctcagacttctgccatgctcttcacggtggacaatgaggctggcaagatcacgtgcctgtgtcaagtcccccagaatgcagccaatcggggcttaaaagccagcgagtgggtgcagcaggtgtcaggcttgatggacggtaaaggtggtggcaaggatgtgtctgcacaggccacaggcaagaacgttggctgcctgcaggaggcgctgcagctggccacttccttcgcccagctgcgcctcggggatgtaaagaactgagtggggaaggaggaggctcccactggatccatccgtccagccaagagctcttcatctgctacaagaacatttgaatcttgggacctttaaagagcccctcctaacccagcagtaactggaacacacttgggagcagtcctatgtctcagtgccccttaaatttctgccctgagccctccacgtcagtgccatcggtctagaaccactaaccccgcattgctgttgatcgtcacgctcgcatctatagataacggctctccagacctgagctttccgcgtcagcaagtaggaatcgtttttgctgcagagaataaaaggaccacgtgc

SEQ ID NO: 32 - DNA, 2999 bp, Homo sapiens
  mRNA (1)..(2999): gi|17017990|ref|NM_017647.2| Homo sapiens FtsJ homolog 3 (E. coli) (FTSJ3)
atacttgtgcggttccaagtgtggagaaagcggctctgggtctagattgagggatactccccctttccaccatgggcaagaagggcaaagttggcaagagccgacgagacaagttttatcacttggcgaaggagacgggttaccgttcccgatctgctttcaagctgatccagctcaatcgccgctttcagttcctgcagaaagcccgagccttgctggacctgtgtgctgcgccagggggatggctgcaggtagctgccaagtttatgcctgtatccagccttattgtgggagtggacctggttccaatcaagcctctccccaatgtggtgactctccaggaggacatcacaacagaacgttgtaggcaggccctgaggaaggagctgaagacctggaaggttgatgttgtgctcaatgatggggcccccaacgttggggctagctgggtccatgatgcttactcacaagcccatttgacactgatggctctacgtttggcttgtgactttttggcccgtggtggcagcttcatcacaaaggttttccgttctcgtgactatcagcctctgctatggatctttcagcagctgttccgccgtgtccaggccaccaagccccaagcctctcgccatgaatctgcagagatctttgtagtctgccaaggattcctggcccctgacaaggttgacagtaaattctttgaccccaaatttgcctttaaggaggttgaagttcaggctaagaccgttactgaattggttactaagaagaagccaaaggctgaaggctatgctgagggtgacctcactctctatcaccgtacctcagtcactgacttcctccgagctgccaaccctgttgacttcctctccaaggccagcgaaatcatggtagatgatgaagagttggcacagcatccagctaccactgaggacatacgggtgtgctgtcaggacatcagagtgttggggcgcaaggagctcaggtcgctactaaactggagaacaaaacttcggcgatatgtggccaagaagctgaaagaacaagcaaaggcactggacatcagcctcagctctggagaggaagatgaaggtgatgaggaggactcaacagctggaaccacaaagcagccctctaaggaggaggaggaagaggaggaggaggaacaactgaaccagaccttggcagaaatgaaggcccaggaggtggcggaattgaagaggaagaaaaagaagctgttgcgtgagcagagaaagcagcgggagcgtgtggagctgaagatggatctgcctggggtttccattgcagacgagggggagactggcatgttctccttgtgcaccatccggggtcaccagttattagaggaagtaacacaaggggatatgagtgcagcagacacatttctgtccgatctgccaagggatgatatctatgtgtcagatgttgaggacgacggtgatgacacatctctggatagtgacctggatccagaggagctggcaggagtcaggggacatcagggtctaagggaccaaaagcgtatgcgacttactgaagtgcaagatgataaagaggaggaggaggaggagaatccactgctggtaccactggaggaaaaggcagtactgcaggaagaacaagccaacctgtggttctcaaagggcagctttgctgggatcgaggacgatgccgatgaggccctggagatcagtcaggcccagctgttatttgagaaccggcggaagggacggcagcagcagcagaagcagcagctgccacagacacccccttcctgtttgaagactgagataatgtctcccctgtaccaagatgaagcccctaagggaacagaggcttcttcggggacagaagctgccactggccttgaaggggaagaaaaggatggcatctcagacagtgatagcagtactagcagtgaggaagaagagagctgggaacccctccgtggtaagaagcgaagccgtgggcctaagtcagatgatgacgggtttgagatagtgcctattgaggacccagcgaaacatcggatactggaccccgaaggccttgctctaggtgctgttattgcctcttccaaaaaggccaagagagacctcatagataactccttcaaccggtacacatttaatgaggatgagggggagcttccggagtggtttgtgcaagaggaaaagcagcaccggatacgacagttgcctgttggtaagaaggaggtggagcattaccggaaacgctggcgggaaatcaatgcacgtcccatcaagaaggtggctgaggctaaggctagaaagaaaaggaggatgctgaagaggctggagcagaccaggaagaaggcagaagccgtggtgaacacagtggacatctcagaacgagagaaagtggcacagctgcgaagtctctacaagaaggctgggcttggcaaggagaaacgccatgtcacctacgttgtagccaaaaaaggtgtgggccgcaaagtgcgccggccagctggagtcagaggtcatttcaaggtggtggactcaaggatgaagaaggaccaaagagcacagcaacgtaaggaacaaaagaaaaaacacaaacggaagtaagcagagctgccaggctcccaggagagcatggggactaggaggaagggtgtggcatggctcagtctggcccccttgattaccggcctagcccctgctcacatcacagctgtctgaagaacagtgaggtggagtgcctagaactcccgtggtggtcctgagcagagaggaggatgtcctcctgcctgcctgaaggtctcccatgaaaacactgctgaactgtgttgacactcatgaccctttttttaaaccgttaaagggaagttcggtgttggagcgatactcaatgtagtcagtctacacctggacgtgtgggccacttaagccctccccacccccatcctattcctaaataaaaccaggataatggaaaaaaaaaaaaaaaaa

SEQ ID NO: 33 - DNA, 4257 bp, Homo sapiens
  mRNA (1)..(4257): gi|51873035|ref|NM_002541.2| Homo sapiens oxoglutarate (alpha-ketoglutarate) dehydrogenase (lipoamide) (OGDH), nuclear gene encoding mitochondrial protein, transcript variant 1
atacgccggggcggggccgagagtttggagccccggagtggggtgtcggcgcctcattcgggtggagctgagccggagacaggcagttgtgaaaaacttcaggacaaaaatgtttcatttaaggacttgtgctgctaagttgaggccattgacggcttcccagactgttaagacattttcacaaaacagaccagcagcagctaggacatttcaacagattcggtgctattctgcacctgttgctgctgagccctttctcagtgggactagttcgaactatgtggaggagatgtactgtgcttggctggaaaaccccaaaagtgtacataagtcatgggacattttttttcgcaacacgaatgccggagccccaccgggcactgcctaccagagtccccttcccctgagccgaggctccctggctgctgtggcccatgcacagtccctggtagaagcacagcccaacgtggacaagctcgtggaggaccacctggcagtgcagtcgctcatcagggcatatcagatacgagggcaccatgtagcacagctggaccccctggggattttggatgctgatctggactcctccgtgcccgctgacattatctcatccacagacaaacttgggttctatggcctggatgagtctgacctcgacaaggtcttccacttgcccaccaccactttcatcgggggacaggaatcagcacttcctctgcgggagatcatccgtcggctggagatggcctactgccagcatattggggtggagttcatgttcatcaatgacctggagcagtgccagtggatccggcagaagtttgagacccctgggatcatgcagttcacaaatgaggagaaacggaccctgctggccaggcttgtgcggtccaccaggtttgaggagttcctacagcggaagtggtcctctgagaagcgctttggtctagaaggctgcgaggtactgatccctgccctcaagaccatcattgacaagtctagtgagaatggcgtggactacgtgatcatgggcatgccacacagagggcggctgaacgtgcttgcaaatgtcatcaggaaggagctggaacagatcttctgtcaattcgattcaaagctggaggcagctgatgagggctccggagatgtgaagtaccacctgggcatgtatcaccgcaggatcaatcgtgtcaccgacaggaacattaccttgtccttggtggccaacccttcccaccttgaggccgctgaccccgtggtgatgggcaagaccaaagccgaacagttttactgtggcgacactgaagggaaaaaggtcatgtccatcctgttgcatggggatgctgcatttgctggccagggcattgtgtacgagaccttccacctcagcgacctgccatcctacacaactcatggcaccgtgcacgtggtcgtcaacaaccagatcggcttcaccaccgaccctcggatggcccgctcctccccctaccccactgacgtggcccgagtggtgaatgcccccattttccacgtgaactcagatgaccccgaggctgtcatgtacgtgtgcaaagtggcggccgagtggaggagcaccttccacaaggacgtggttgtcgatttggtgtgttaccggcgcaacggccacaacgagatggatgagcccatgttcacgcagccgctcatgtacaagcagatccgcaagcagaagcctgtgttacagaagtacgctgagctgctggtgtcgcagggtgtggtcaaccagcctgagtatgaggaggaaatttccaagtatgataagatctgtgaggaagcttttgccagatctaaagatgagaagatcttgcacattaagcactggctggactctccctggcctggcttcttcaccctggacgggcagcccaggagcatgtcctgcccctccacgggtctgacggaggatattctgacacacatcgggaatgtggctagttctgtgcctgtggaaaactttactattcatggagggctgagccggatcttgaagactcgtggggaaatggtgaagaaccggactgtggactgggctctagcggagtacatggcgtttggctcgctcctgaaggagggcatccacattcggctgagcggccaggacgtggagcggggcacattcagccaccgccaccatgtgctccatgaccagaatgtggacaagagaacctgcatccccatgaaccatctctggcccaatcaggccccctatactgtgtgcaacagctcactgtctgagtacggcgtgctgggctttgagctgggcttcgccatggccagtcctaatgccctggtcctctgggaagcccaatttggtgacttccacaacacggcccagtgtatcatcgaccagttcatctgcccgggacaagccaagtgggtgcggcagaatggcatcgtgttgctgctgccccatggcatggagggcatgggtccagaacattcctccgcccgcccagagcggttcttgcagatgtgcaacgatgacccagatgtcctgccagaccttaaagaagccaacttcgacatcaatcagctatatgactgcaattgggttgttgtcaactgctccactcctggcaacttcttccacgtgctacgacgccagatcctgctgccattccggaagccgttaattatcttcacccccaaatccctgttgcgccaccccgaggccagatccagctttgatgagatgcttccaggaacccacttccagcgggtgatcccagaagatggccctgcagctcagaacccagaaaatgtcaaaaggcttctcttctgcaccggcaaagtgtattatgacctcacccgggagcgcaaagcacgcgacatggtggggcaggtggccatcacaaggattgagcagctgtcgccattcccctttgacctcctgctgaaggaggtgcagaagtaccccaatgctgagctggcctggtgccaggaggagcacaagaaccaaggctactatgactacgtgaagccaagacttcggaccaccatcagccgcgccaagcccgtctggtatgccggccgggacccagcggctgctccagccaccggcaacaagaagacccacctgacggagctgcagcgcctcctggacacggccttcgacctggacgtcttcaagaacttctcgtagatgctgcctagggttgcttgggccactgccctctccacacccatgactgccccttgcttctcaactaaagaatagtgcctcagcgctgcccacaccaccgccctcctcgctgtgccaccacccctccctctgctctcataggagttaggctgtcgtccccctccagtgcttggctgccccacaggccacacgctgcccaggctctgctgacttctgagcagttttccaggaggccggggggagcaggaggaggaaaggtagcccccgagggatgtccttggggaggggtcagctctggccacaatcctccccaccagtctcacccactaggataggaactgggccttgtgtgctggcttccgctgtcacccagcaaggcacaggctcctgtatttgagactaggatagcttcatcttgagcctgagccttagaatctgtagaggagcctggagtcggatctagccatggctggcagaggtttctagggtgggccccagccgtggcgtgaactgaggatgacccggggcagctggcaggagagagccttggcctgacctggcacagaaagggcagcttcagtctctgcagtgtccattatctgctgttccttcgagggttccaggctgtgtgtggggcccaagcatgccccacccacccctcctgggcccaggcagcacctggagcccacagagtctgtgtgtagccaggaagccccgctcaggtagccaccaccggggcactggctgctctgtcttggtcctgttaaccctccacctcctctcttggactccctccccaccccaaccactctttctttctcctttaacccaatggagactttctgatgcatcgttttctttgctgtgccaaagcaggtcagaagagggagaggaggggctgggggtgaggggccaggccatggccaaggggccagctgcccctcatttatcactctgaccttcacagggacagatctgatttatttattttggttaaaaaaaaaaaaaaggaacagaaacaactttgcattgcattggcttgacccataaactaagttatatccgtgggcaaaaaa

SEQ ID NO: 34 - DNA, 1693 bp, Homo sapiens
  mRNA (1)..(1693): gi|34734076|ref|NM_005438.2| Homo sapiens FOS-like antigen 1 (FOSL1)
acgggccaaggcggcgcgtctcgggggtggagcctggaggtgaccgcgccgctgcaacgcccccaccccccgcggtcgcagtggttcagcccgagaacttttcattcataaaaagaaaagactccgcacggcgcgggtgagtcagaacccagcagccgtgtaccccgcagagccgccagccccgggcatgttccgagacttcggggaacccggcccgagctccgggaacggcggcgggtacggcggccccgcgcagcccccggccgcagcgcaggcagcccagcagaagttccacctggtgccaagcatcaacaccatgagtggcagtcaggagctgcagtggatggtacagcctcatttcctggggcccagcagttaccccaggcctctgacctaccctcagtacagccccccacaaccccggccaggagtcatccgggccctggggccgcctccaggggtacgtcgaaggccttgtgaacagatcagcccggaggaagaggagcgccgccgagtaaggcgcgagcggaacaagctggctgcggccaagtgcaggaaccggaggaaggaactgaccgacttcctgcaggcggagactgacaaactggaagatgagaaatctgggctgcagcgagagattgaggagctgcagaagcagaaggagcgcctagagctggtgctggaagcccaccgacccatctgcaaaatcccggaaggagccaaggagggggacacaggcagtaccagtggcaccagcagcccaccagccccctgccgccctgtaccttgtatctccctttccccagggcctgtgcttgaacctgaggcactgcacacccccacactcatgaccacaccctccctaactcctttcacccccagcctggtcttcacctaccccagcactcctgagccttgtgcctcagctcatcgcaagagtagcagcagcagcggagacccatcctctgacccccttggctctccaaccctcctcgctttgtgaggcgcctgagccctactccctgcagatgccaccctagccaatgtctcctccccttcccccaccggtccagctggcctggacagtatcccacatccaactccagcaacttcttctccatccctctaatgagactgaccatattgtgcttcacagtagagccagcttggggccaccaaagctgcccactgtttctcttgagctggcctctctagcacaatttgcactaaatcagagacaaaatatttcccatttgtgccagaggaatcctggcagcccagagactttgtagatccttagaggtcctctggagccctaaccccttccagatcactgccacactctccatcaccctcttcctgtgatccacccaaccctatctcctgacagaaggtgccactttacccacctagaacactaactcaccagccccactgccagcagcagcaggtgattggaccaggccattctgccgccccctcctgaaccgcacagctcaggaggcgcccttggcttctgtgatgagctgatctgcggatctcagctttgagaagccttcagctccagggaatccaagcctccacagcgagggcagctgctatttattttcctaaagagagtatttttatacaaacctaccaaaatggaataaaaggcttgaagctgtgaaaaaaaaaaaaaaaaaaaaaaaaa

SEQ ID NO: 35 - DNA, 2961 bp, Homo sapiens
  mRNA (1)..(2961): gi|19882216|ref|NM_133645.1| Homo sapiens mitochondrial translation optimization 1 homolog (S. cerevisiae) (MTO1), transcript variant 1
ggccgcgccctgcagattgtctcttgttgcgtaagtttttttgaccgtcactcgtgtcagcttcaaagtcagatagatttttctcccagcatgttctacttccgaggctgtggccgttgggtcgcggtttccttcaccaagcagcaatttccgttggcacggttgagcagtgacagcgcggcgccccggactccgcacttcgacgtgatagtcattggtggaggacatgccgggactgaggcagccaccgccgccgctcggtgcggctctcggactctgctcctcactcaccgcgtggacacgatcggtcagatgtcatgtaatccttcctttggtggcatcggaaagggacatttaatgagggaagtagatgccttggatggcctgtgttctcgcatctgtgaccagtctggtgtacattataaagtattaaaccggcgtaagggaccagctgtgtggggtctgagagctcagattgataggaaactctacaaacagaacatgcagaaagaaatcttgaatacaccactgcttactgttcaggagggagctgtagaagatcttattcttacagaaccagagcctgaacacactgggaaatgccgtgtcagtggggttgttttggtggatggaagcacagtatatgcagagagtgtgattctgactactgggacatttctgagaggcatgattgtaattggattggagacgcatccagcaggacgtttaggggatcagccttctataggattggctcagacactggagaagttagggtttgtggtgggaaggttgaagactgggactccaccccgaattgccaaagagtccattaatttcagtattctaaacaagcatataccggacaatccatccataccattcagctttaccaatgagacagtatggattaagccagaagatcagctgccatgttacttgactcacaccaaccctagagtggatgagattgtccttaagaaccttcaccttaatagtcatgttaaagaaacgacaagaggacctcgatactgtccctccattgaatcaaaagttttgcgttttccaaaccgtctacatcaggtttggttggaacctgaaggaatggattctgaccttatctacccacaggggttatctatgacgctaccagctgagttacaagagaaaatgatcacatgcatcagaggcttggagaaagctaaagtgattcagccagacggagttttgctcttgttgcccaggatggagtgcaatggtgcgatctcggctcaccacaacctccccctgccaggctacggtgttcagtatgattacttagatccccgtcagatcaccccttccttggagactcatttggttcaacgactcttctttgctggacagatcaatggcaccactggttatgaggaagctgcagctcaaggtgtgatagccggaatcaacgccagtcttcgggtcagtcgcaagcctccctttgtggttagccgaacagaaggttacataggagtcttgattgatgacctcactactctgggcaccagtgaaccataccgcatgtttaccagccgagtagagttccgtttgtcactgcgccctgataatgctgacagccggctcacactgcgagggtataaagacgctggctgtgtgtcccaacaacgatatgaaagagcttgttggatgaagtcttctttagaagaaggcatttctgtgttgaaatctattgagtttttgagctctaaatggaaaaaattaatcccagaggcttctataagtactagtagaagtctgcctgtcagagctctcgatgttctgaagtatgaggaagttgacatggattcattagccaaggctgttccagagcccttgaagaagtatactaaatgtagagagctggctgaaagactgaaaatagaagccacttatgaatcagtgttgttccatcaactacaagaaataaagggagttcagcaagatgaagctctccaactgccaaaagacctagattatttgactatcagggatgtgtctttgtcccatgaagttcgagagaaactacattttagtcgtccacagacgatcggggctgctagtcgcatacccggagtaacacctgccgccatcatcaatctgctgagatttgtgaagaccactcaacgaagacagtcggctatgaatgaatcatccaagactgatcaatacttatgtgatgcagacagacttcaagagagagagttatagctttcaattcataaaagatttttaaagagcatataaataatttgatcaatacaacagtatagataaaagaattatttagcacatgttaaaatagctttattaggttactatgggtttgccattaatttctgagtgggacagaaattataattgtgctttttcgtgtatatgaaaaaactagtcgtaaacaatttgtactctttctttaaggagctgtaatacaaataactttgtgcagtgttcatcaaagagagagacagtgaacctaaaactgaacctggaataaaactcaacatgcagatttgcctactcatagggactttgcctattaagtctaccaaattaaaagtcttatcattcagcgtgttttgagagttaataatcttttgcttggttatactaggctaggaagcaatatcaaagcccttaaattctcaagactaaagacttgagattatataaaattatccagaatcattcagctaatactattggaatatagtatgtagggtgaaagttgacagaaatctgtacttcttcaggaaatcctcactggtaattgttttgaacattaatgaaagccctataaaatagaaagattggaaatcaccattgtttcctattatccacagtgtggatggatacttatttggtgacctagttatgggagaattgagtaacgttagttattttatatcataccataaaaatattttc

SEQ ID NO: 36 - DNA, 5861 bp, Homo sapiens
  mRNA (1)..(5861): gi|51466659|ref|XM_290401.5| PREDICTED: Homo sapiens hypothetical protein LOC340318 (LOC340318)
cgcttcctgtgcctcttcaggtcatcgcttgctctcgttcccaggctttggcttctagtggacgagaatcaccgagtctgcggggctggatgctgaccgcccggaccagcacctaggcgggcgggagctgtgcggcccagggttcgcgcgggccgggtagaggctcgagctgggacccccgagcgtgaaccccggagccggcggcgctggggccagaggggccgggagccccagggaggcggatctgggccccgagaaggacacccgcctggatttgccccgtaggcccggcccgggcccctcgggagcagaacagccttggtgaggtggacaggaggggacctcgcgagcagacgcgcgcgccagcgacagcagcccgccccggcctctcgggagccgtggggcagaggctgcggagccccaggagggggccagtgtcattcaaagatgtggctgtggatttcacccaggaggagtggcggcaactggaccctgatgagaagataacatacggggatgtgatgttggagaactacagccatctagtttccttggcttatgaggtggcaacatcttgtacttcggagattctgaagccgagcaacttgcccaagtccttcttcttttcccattaacaagatatgatatcaccaagccaaacgtcatcattaagttggagcagggagaggagctgtggataacgggaggtgaatttccatgtcaacatagtcctgggatcgtgggactttaccagatcggtttgtaataacacctcgaagacgctatccgatccatcagacccagtattcctgtccgggggtacttcccacagtgtgctggaatggttatcacaagaaggctgtgctgtcccctcgcaactccaggatggtgtgtagcccagtgactgtgaggatcgcccctcctgacagaagattttcacgttctgcgataccagagcagataatcagctcaacactgtcgtcaccatcaagtaatgccccagacccatgtgcaaaggagactgtactgagtgccctcaaagagaagaagaagaaaaggacagtggaggaagaagaccaaatattccttgatggccaggaaaataaaagaaggcgccatgatagcagtggcagtggacattcagcatttgagcccctggtggccagtggagtccccgcttcttttgtgcctaagcctgggtctctgaagagaggcctcaattctcagagctcagatgaccacttgaataagagatcccgaagctcttccatgagctccttgacaggcgcttacacaagtggcatccctagctccagccgcaatgccattaccagttcctacagctccactcgaggcatctcacagctctggaagagaaatggccccagttcatcacccttctctagcccagcctcatcccgctcccagacaccggagaggccagcaaagaaaataagagaagaagagctgtgtcatcattccagttcttcaactccattggcagcagacaaggagtcccagggagaaaaggctgcagatacaaccccaaggaagaaacaaaactcgaattctcagtctacacctggcagctctgggcagcgtaagcggaaagttcagctgctgccttctcggcgaggggaacagctgaccttgcctccacctccccagcttggctattcgatcactgccgaggacctagacttagagaagaaggcttcattacagtggttcaaccaggccttggaggacaagagtgatgctgcctcgaactctgtcactgagaccccacctaccactcagccttcatttacctttaccctgcctgctgctgcaactgcctccccacccacctccctcctggccccaagcaccaacccactgttagagagcttgaagaagatgcagactcccccgagcctgccaccctgcccagaatctgctggagcagcaaccactgaggccctctcacctccaaagacacccagcctcctacccccgctgggtttatcacagtcagggccgccagggctgctccccagcccctcctttgactccaaacccccgaccactttgctggggctgatccctgctccatccatggtaccagccactgacaccaaggcacctccaacccttcaagcagagacggctaccaaaccccaagccacatctgccccgtcccccgcccccaagcaaagcttcctgtttggaacacagaacacctcaccttccagccctgccgcccctgctgcatcttcagcatctcccatgttcaagcccattttcacggctccacccaagagtgagaaggaaggccccacaccgcctggcccttcagtcacagccacagcgccctccagctcctccctccccacgaccaccagcaccacagccccgaccttccagcctgtctttagcagcatggggccacctgcatctgtgcccttgcctgctcccttcttcaagcagacaactactcccgccactgctcccaccacaactgccccgctcttcactggcctggccagcgccacctctgctgtggctcccatcacctctgccagtccatccacagactctgcttcgaagcctgcgtttggctttggcataaacagtgtgagcagcagcagtgtgagtaccacgaccagcaccgccactgccgcctcacagcctttcctcttcggggcgccccaggcctctgctgccagcttcaccccggccatgggctccatattccagtttggcaaacctcctgccttgcccacaaccaccacagtcaccaccttcagccagtccctgcccactgccgtgccaacggccaccagcagcagcgctgccgactttagtggttttggcagcaccctcgccacctccgccccggccaccagcagccagcccactctgacgttcagtaacacgagcacccccacgttcaacattccctttggctcaagcgccaagtccccgctcccatcatatccgggagccaacccccagcccgcatttggggccgctgaggggcagccaccgggggccgccaagccagcccttacccccagctttggcagctctttcacttttggaaactctgcagccccggccccggctactgcacccacacctgcacctgcgtccacgatcaagatcgtgcctgcgcacgtgcctacgcccatccagcctacctttggcggtgccacgcactcggcgtttggattgaaagccacggcttccgccttcggcgctcccgccagctcacagcccgcctttggcggctccactgctgtcttctccttcggtgcagccaccagctccggctttggagccaccacccagaccgccagcagcgggagcagcagctcggtgtttggcagcacaacaccatcacccttcacgtttgggggttcggcagcccccgctggcagtgggagctttgggatcaacgtggccaccccaggctccagcgccaccaccggagctttcagctttggagcaggacagagtgggagcacagccacctccacccccttcacagggggcttaggtcagaacgccctgggcaccaccggccagagcacaccgtttgccttcaacgtgggcagcacaactgagagcaaacctgtgtttggaggcaccgccacccccacctttggtcagaacacccctgcgcctggagtgggcacatcgggcagcagcctctcctttggggcatcttcagcacccgcccaaggctttgttggtgttggaccgttcggatcggcggccccttcattttccattggtgcgggatccaagaccccaggggctcgacagcgactgcaggcccgaaggcagcacacccgcaaaaagtagcctttgtcccctgtccctgttccccccaccccttccctaaatctggaccttggcacgtgctagaaagagccttggacccttccagctgcgtaaagcaaacctaccccggatctctggcttcagccgccagggggcagtggcagccctggggccctttcccttctggaggaagcacaagcctcagggaaggggaagcaggatgcggagggccaaagcccgggacctctacttgaacagttccactggggaggctggagaactaaggacctgtacatagtgtccgctgccctgactcccgcttagcgcacccttaggcaggcgccccttccacctttccccgagagccgtcgtcgctggagggggcagggtccagcccgcctggatcggtggtgtgcacctgatgggatttgggaaatgggttatccctaaagctttatcttgcttggcttagctgtgagaagtggttctcttcctctggtcccttctggggactctgtttccccatttcttgctgctgtgtccctcaccggttccttgcaggattccctcctttttaaatgcccttgaatctagctttgccttggagaccccagtgggtgctgctcctgccgttttcttcctgccaagcctgaatcaatgtttcatctccaaccctctgccagtttggcccctcagagcttggtggctcaagactgttagcctggcagagccaggggtgaagggagaagctcttggagcaggcaggatgcccaccgctgcttcagctgcctcctcgcccagctaccctttggccccattgggccctcgtctgcctctccaggattgtatgtttcaagccttgtcctgtgttcctttgtctgacgctctgtgtattgctctttgaatcgagtttggaggaagagttgagttgtatgagtggcggcatgttggtagtgccggacttcctgtttcaagttttctggggcctcgctaattgaatgtggaaagtagcaccacttgacggctacaagtgccgactcctgaattttcccatggtgttctgacttcaagggctggcagccagggagaatgggcccaggggaagcaaagacctcttccctctgcggtttctgtcccacttaactgacctcactggaggctacgtcacccaaagtagatgttagaaaacctaaattaatgaaccatatttttaaaatcctatttttcccaaacagggccctctgcagcccatcctttccttccgtccttctgaaaccacataccccaggcccaagcgccttgctgtcacgcccaacctctttgggagaagtatgaatgcgtgtgtctaaattaaaagaaaaaaatatttaaacgttttttaacaaaaatttatttttgtatttaagctaaattgccttttaaattccttcaagcttggttcattgaggtggttaagtataaatgctattaactaggaattagctgtatagttaagttatgcctgtgcaaagaagaggctcaaatgctgtccccggcagctttcctgggggactagagctccttctggccatgttatatgaaatgtaattcttattttataaataatgtgatgtagatgtaaccggtgccccctccccgttgtgactgagggcgagtgttatacctggctgcgtgtgcagctgaggagggagtgaacctcaagcctaaatacctgttaggattggagggtctgggtgggcctgggcctagcaatcaatcaagcttctacctgtaccttatgtaaggtagaccctcctagtgtcagtacctgagcttgtttacctcagttccgcaggcaggacagccggtccgggaaccctgagtgagagtgagtgtggatgtgtacagtacacacactggacggcagcgggaggctgggactttccattacaaatagagacttcattcctgttgagtctagttggaatttttagtatgaatgtgagatttttctcctgcttgtgacattaagaataaaaaactgtgatctatcg

SEQ ID NO: 37 - DNA, 1449 bp, Homo sapiens
  mRNA (1)..(1449): gi|16579884|ref|NM_000968.2| Homo sapiens ribosomal protein L4 (RPL4)
cttttcctgtggcagcagccgggctgagaggagcgtggctgtctcctctctccgccatggcgtgtgctcgcccactgatatcggtgtactccgaaaagggggagtcatctggcaaaaatgtcactttgcctgctgtattcaaggctcctattcgaccagatattgtgaactttgttcacaccaacttgcgcaaaaacaacagacagccctatgctgtcagtgaattagcaggtcatcagactagtgctgagtcttggggtactggcagagctgtggctcgaattcccagagttcgaggtggtgggactcaccgctctggccagggtgcttttggaaacatgtgtcgtggaggccgaatgtttgcaccaaccaaaacctggcgccgttggcatcgtagagtgaacacaacccaaaaacgatacgccatctgttctgccctggctgcctcagccctaccagcactggtcatgtctaaaggtcatcgtattgaggaagttcctgaacttcctttggtagttgaagataaagttgaaggctacaagaagaccaaggaagctgttttgctccttaagaaacttaaagcctggaatgatatcaaaaaggtctatgcctctcagcgaatgagagctggcaaaggcaaaatgagaaaccgtcgccgtatccagcgcaggggcccgtgcatcatctataatgaggataatggtatcatcaaggccttcagaaacatccctggaattactctgcttaatgtaagcaagctgaacattttgaagcttgctcctggtgggcatgtgggacgtttctgcatttggactgaaagtgctttccggaagttagatgaattgtacggcacttggcgtaaagccgcttccctcaagagtaactacaatcttcccatgcacaagatgattaatacagatcttagcagaatcttgaaaagcccagagatccaaagagcccttcgagcaccacgcaagaagatccatcgcagagtcctaaagaagaacccactgaaaaacttgagaatcatgttgaagctaaacccatatgcaaagaccatgcgccggaacaccattcttcgccaggccaggaatcacaagctccgggtggataaggcagctgctgcagcagcggcactacaagccaaatcagatgagaaggcggcggttgcaggcaagaagcctgtggtaggtaagaaaggaaagaaggctgctgttggtgttaagaagcagaagaagcctctggtgggaaaaaaggcagcagctaccaagaaaccagcccctgaaaagaagcctgcagagaagaaacctactacagaggagaagaagcctgctgcataaactcttaaatttgattattccataaaggtcaaatcattttggacagcttcttttgaataaagacctgattatacaggcagtgagaaacatgaaaaaaaaaaaaaaaaaa

SEQ ID NO: 38 - DNA, 3716 bp, Homo sapiens
  mRNA (1)..(3716): gi|21536321|ref|NM_144733.1| Homo sapiens heterogeneous nuclear ribonucleoprotein U-like 1 (HNRPUL1), transcript variant 2
cggacgaggcacgagtgaggggggaggcggtggcggcggccattttgagccgctgccgccattggagtgggccccccccctttcccccttcgcctcctgacaggaaaggtttaagggggacagagccctgggaggccgggccgggctcgggggccaccccgggggcccgggccatggatgtgcgccgtctgaaggtgaacgaacttcgcgaggagctgcagcgccgcggcctggacactcgaggcctcaaggccgagcttgctgagcggctgcaggcggcgttggaggccgaggagcctgacgacgagcgggagctcgacgccgacgacgaaccggggcgacccgggcacatcaacgaggaggtcgagaccgaggggggctccgagctggaggggaccgcgcagccaccgccgcccgggctgcagccgcacgcggagcccggcggctactcggggccggacggacattatgccatggacaatattaccaggcagaaccaattctacgatacccaagtcatcaaacaagaaaacgagtcaggctacgagaggagaccactggaaatggagcagcagcaggcctatcgtccagaaatgaagacagagatgaagcaaggagcacccaccagcttcctcccgcctgaagcttctcaactcaagccagacaggcagcaattccagagtcgaaagaggccttatgaagaaaaccggggacgggggtactttgagcaccgagaggataggaggggccgctctcctcagcctcctgctgaagaggatgaagatgactttgatgatacccttgttgctattgacacctataactgcgacctccacttcaaggtggcccgagatcggagtagtggctatccgctcacaattgagggctttgcatacctgtggtcaggagcccgtgccagctatggggtcagaaggggccgtgtatgcttcgagatgaagatcaatgaggaaatctccgtgaagcaccttccgtctacagagcctgacccccacgtggtccgtatcggctggtccctggactcctgcagcacccagctaggcgaagagcctttctcctatggctatggaggcactgggaagaagtccaccaatagccggtttgaaaactacggagacaagtttgcagagaacgatgtgattggctgctttgcggattttgaatgtggaaatgacgtggaactgtcttttaccaagaatggaaagtggatgggcattgctttccgaatccagaaggaagccttggggggtcaggccctctatcctcatgtcctggtgaagaattgcgcagtggagttcaacttcggacagagagcagagccctactgttctgtcctcccggggtttaccttcatccagcaccttccccttagtgagcgtatccggggcaccgttggaccaaagagcaaggcagaatgtgagattctgatgatggtgggcctgcctgctgctggcaagaccacatgggccatcaaacatgcagcctccaacccttccaagaagtacaacatcctgggtaccaatgccatcatggataagatgcgggtgatgggcctacgccggcagcggaactatgctggccgctgggatgtcctgatccagcaggccacccagtgcctcaaccgcctcatccagattgctgcccgcaagaaacgcaactatatcctagatcagacaaatgtttatgggtcagcccagagacgaaaaatgagaccatttgaaggcttccagcgcaaagctattgtaatttgtcccactgacgaggacctaaaagaccgaacaataaagcgaaccgacgaggaagggaaggatgtcccagatcatgcggtcttagaaatgaaagccaacttcacgttgccagatgttggggacttcctggatgaggttctgttcattgagctgcagcgggaggaagcggacaagctagtgaggcagtacaacgaggaaggccgcaaggctgggccaccccctgaaaagcgctttgacaaccgaggtggtggtggcttccggggccgcgggggtggtggtggcttccagcgctatgaaaaccgaggaccccctggaggcaaccgtggcggcttccagaaccgagggggaggcagcggtggaggaggcaactaccgaggaggtttcaaccgcagcggaggtggtggctatagccagaaccgctggggtaacaacaaccgggataacaacaactccaacaacagaggcagctacaaccgggctccccagcaacagccgccaccacagcagcctccgccaccacagccaccaccccagcagccaccgccaccacccagctacagccctgctcggaaccccccaggggccagcacctacaataagaacagcaacatccctggctcaagcgccaataccagcacccccaccgtcagcagctacagccctccacagacctaccctcagcccagctataaccagtatcagcagtatgcccagcagtggaaccagtactatcagaaccagggccagtggccgccatactacgggaactacgactacgggagctactccgggaacacacagggtggcacaagtacacagtagccagtgtgacccagaggctcccggaggcccctgccggcttcctccaccagcgcctgcctcggcccctcctctgcccccgccagatcccgtggtgctggggatggggtcatcccagggctgcctccctccagcccactgcctcccctctgaggggcttccttcccctccatagggccaggcatttttttctggattcaaacaggcaacaatgaccttttattttctgtttgtccccacctccccagccttccacctcctgttcttcctaccttcttcctttttgactaaataatccccacctcccttgatcatacagtgaggctacagtgactgaggggagaatcccctcctgttcactctcccaaccctgctccagcccctcagcttcccagaccctcatgcagttggttgtaaattctcccaggagctgttttactgtctacttttcaggattaaaaaaaaaatcaaaacttaaaaaaaaaaaagtttaaaaagcaaaatggggagggggaggaagcagtgacttttttttggtaattatgcgcttttttttaatttttagaatttgtctttttactgtgggtgggctgttgatatttcatcaagataagcatttctttcctgagttcaggtgactgaggaagagccacaaaacaaaacacaacaaaaccaaaccacagaatcatctttaacccaactttttatacgatgccccagttccccataactttgcacacaagcttctgtgttcagttgaattgtaactgctttttgtatttggagagagtgactattgaacttgaaaccttttattccgggcgtcttggtagtttctggtgggattcagtgggtgagagggaagaaggggaggttggggggctccttcccttcagaacttgaagtttctcccactgcctcctctccagtggtctcccaggtgccagacccaaaagcttttcctacagtgataccctttatttttacttccccttgactcatatgttttaacatgattttaacaaactgcacttattaagaaatgtgtttgccctgttttgtttggtttcgttttgttttctttgaataaatgacatggcacctcctagcaggaaggaagcagggttgaaa

SEQ ID NO: 39 - DNA, 2502 bp, Homo sapiens
  mRNA (1)..(2502): gi|4758859|ref|NM_004741.1| Homo sapiens nucleolar and coiled-body phosphoprotein 1 (NOLC1)
gaattcgtgggtcgtgctgcgtcgacaacggtagtgacgcgtattgcctggaggatggcggacgccggcattcgccgcgtggttcccagcgacctgtatcccctcgtgctcggcttcctgcgcgataaccaactctcagaggtggccaataagttcgccaaagcgacaggagctacacagcaggatgccaatgcctcttccctcttagacatctatagcttctggctcaagtctgccaaggtcccagagcgaaagttacaggcaaatggaccagtggctaagaaagctaagaagaaggcctcatccagtgacagtgaggacagcagcgaggaggaggaggaagttcaagggcctccagcaaagaaggctgctgtacctgccaagcgagtcggtctgcctcctgggaaggctgcagccaaagcatcagagagtagcagcagtgaagagtccagagatgatgatgatgaggaggaccaaaagaaacagcctgtccagaagggagttaagccccaagccaaggcagccaaagctcctcctaagaaggccaagagctctgattctgattctgactcaagctccgaggatgagccaccaaagaaccagaagccaaagataacacctgtgacagttaaagctcagactaaagcccctcccaaaccagctcgagcagcacctaaaatagccaatggtaaagcagccagtagcagcagtagcagcagcagcagcagtagcagtgatgactcagaggaggagaaggcagcagccacccccaagaagactgtacctaaaaagcaagttgtggccaaagccccagtgaaagcagctaccacccctacccggaagagttctagcagtgaggattcctccagtgacgaggaagaggagcaaaaaaaacccatgaaaaataaaccaggtccctacagttacgcccccccgccttctgctcccccaccaaagaagtctctgggaacccagcctcccaagaaggctgtggagaagcagcagcctgtggaaagcagtgaagacagcagtgatgagtctgattcaagttctgaagaagagaagaaacccccaactaaggcagtagtctctaaagcaaccactaaaccacctccagcaaagaaagcagcagagagctcttcagacagctcagactctgacagctctgaggatgatgaagctccttctaagccagctggtaccaccaagaattcttcaaataagccagctgtcaccaccaagtcacctgcagtgaagccagctgcagcccccaagcaacctgtgggcggtggccagaagcttctgacgagaaaggctgacagcagctccagcgaggaagagagcagctccagtgaggaggagaagacaaagaagatggtggccaccactaagcccaaggcgactgccaaagcagctctatctctgcctgccaagcaggctcctcagggtagtagggacagcagctctgattcagacagctccagcagtgaggaggaggaagagaagacatctaagtctgcagttaagaagaagccacagaaggtagcaggaggtgcagccccttccaagccagcctctgcaaagaaaggaaaggctgagagcagcaacagttcttcttctgatgactccagtgaggaagaggaagagaagctcaagggcaagggctctccaagaccacaagcccccaaggccaatggcacctctgcactgactgcccagaatggaaaagcagctaagaacagtgaggaggaggaagaagaaaagaaaaaggcggcagtggtagtttccaaatcaggttcattaaagaagcggaagcagaatgaggctgccaaggaggcagagactcctcaggccaagaagataaagcttcagacccctaacacatttccaaaaaggaagaaaggagaaaaaagggcatcatccccattccgaagggtcagggaggaggaaattgaggtggattcacgagttgcggacaactcctttgatgccaagcgaggtgcagccggagactggggagagcgagccaatcaggttttgaagttcaccaaaggcaagtcctttcggcatgagaaaaccaagaagaagcggggcagctaccggggaggctcaatctctgtccaggtcaattctattaagtttgacagcgagtgacctgaggccatcttcggtgaagcaagggtgatgatcggagactacttactttctccagtggacctgggaaccctcaggtctctaggtgagggtcttgatgaggacagaagtttagagtaggtcctaagactttacagtgtaacatcctctctggtccttttctgtgttcctagttttgtacagacttgtttttgagtgttgagtagcagggacaaaataagggaatgttattttttaagaaaattcattttcattgttgtctccttccttttctgtgaaagtcctcatactgagaaatttgtatattttatattaaatcacttactattgaaaaaaaaaaaggaattc

SEQ ID NO: 40 - DNA, 2967 bp, Homo sapiens
  mRNA (1)..(2967): gi|14251213|ref|NM_020414.3| Homo sapiens DEAD (Asp-Glu-Ala-Asp) box polypeptide 24 (DDX24)
ccggaactgcagttgctgctgcagctgaggtacagcggcggtttctgaggttcttcactcgcgactgacggagctgcggtggcgtctccacacgcaaccatgaagttgaaggacacaaaatcaaggccaaagcagtcaagctgtggcaaatttcagacaaagggaatcaaagttgtgggaaaatggaaggaagtgaagattgacccaaatatgtttgcagatggacagatggatgacttggtgtgctttgaggaattgacagattaccagttggtctcccctgccaagaatccctccagtctcttctcaaaggaagcacccaagagaaaggcacaagctgtttcagaagaagaggaggaggaggagggaaagtctagctcaccaaagaaaaagatcaagttgaagaaaagtaaaaatgtagcaactgaaggaaccagtacccagaaagaatttgaagtgaaagatcctgagctggaggcccagggagatgacatggtttgtgatgatccggaggctggggagatgacatcagaaaacctggtccaaactgctccaaaaaagaagaaaaataaagggaaaaaagggttggagccttctcagagcactgctgccaaggtgcccaaaaaagcgaagacatggattcctgaagttcatgatcagaaagcagatgtgtcagcttggaaggacctgtttgttcccaggccggttctccgagcactcagctttctaggcttctctgcacccacaccaatccaagccctgaccttggcacctgccatccgtgacaaactggacatccttggggctgctgagacaggaagtgggaaaactcttgcctttgccatcccaatgattcatgcggtgttgcagtggcagaagaggaatgctgcccctcctccaagtaacaccgaagcaccacctggagagaccagaactgaggccggagctgagactagatcaccaggcaaggctgaagctgagtctgatgcattgcctgacgatactgtaattgagagtgaagcactgcccagtgatattgcagccgaggccagagccaagactggaggcactgtctcagaccaggcgttgctctttggtgacgatgatgctggtgaagggccttcttccctgatcagggagaaacctgttcccaaacagaatgagaatgaggaggaaaatcttgataaagagcagactggaaatctaaaacaggagttggatgacaaaagcgccacctgtaaggcatatccaaagcgtcctctgcttggactggttctgactcccactcgagagctggccgtccaggtcaaacagcacattgatgctgtggccaggtttacaggaattaaaactgctattttggttggtggaatgtccacgcagaaacagcagaggatgctgaaccgtcgtcctgagattgtggttgctactccaggccggctgtgggaattaattaaagaaaagcattatcatttgaggaaccttcggcagctcaggtgcctggtagtggatgaggctgaccggatggttgagaaaggccattttgctgagctctcacagctgctagagatgctcaatgactcccaatacaacccaaagagacaaacgcttgttttttctgccacactcaccctggtgcatcaggctcctgctcgaatccttcataagaagcacaccaagaaaatggataaaacagccaaacttgacctccttatgcagaaaattggcatgaggggcaagcccaaggtcattgacctcacaaggaatgaggccacggtggagacgctaacagagaccaagatccattgtgagactgatgagaaagacttctacttgtactacttcctgatgcagtatccaggccgcagcttagtgtttgccaacagtatctcctgcatcaaacgcctctctgggctcctcaaagtccttgatatcatgcccttgaccctgcatgcctgtatgcaccagaagcagaggctcagaaacctggagcagtttgcccgtctggaagactgtgttctcttggcaacagatgtggcagctcggggtctggatattcctaaagtccagcatgtcatccattaccaggtcccacgtacctcggagatttatgtccaccgaagtggtcgaactgctcgagctaccaatgaaggcctcagtctgatgctcattgggcctgaggatgtgatcaactttaagaagatttacaaaacgctcaagaaagatgaggatatcccactgttccccgtgcagacaaaatacatggatgtggtcaaggagcgaatccgtttagctcgacagattgagaaatctgagtatcggaacttccaggcttgcctgcacaactcttggattgagcaggcagcagctgccctggagattgagctggaagaagacatgtataagggaggaaaagctgaccagcaagaagaacgtcggagacaaaagcagatgaaggttctgaagaaggagctgcgccacctgctgtcccagccactgtttacggagagccagaaaaccaagtatcccactcagtctggcaagccgcccctgcttgtgtctgccccaagtaagagcgagtctgctttgagctgtctctccaagcagaagaagaagaagacaaagaagccgaaggagccacagccggaacagccacagccaagtacaagtgcaaattaactggtcaagtgtgtcagtgactgcacattggtttctgttctctggctatttgcaaaacctctcccacccttgtgtttcactccaccaccaaccccaggtaaaaaagtctccctctcttccactcacacccatagcgggagagacctcatgcagatttgcattgttttggagtaagaattcaatgcagcagcttaatttttctgtattgcagtgtttataggcttcttgtgtgttaaacttgatttcataaattaaaaacaatggtcagaaaaaaaaaaaaaaaaaaaa

SEQ ID NO: 41 - DNA, 3111 bp, Homo sapiens
  mRNA (1)..(3111): gi|21396488|ref|NM_004793.2| Homo sapiens protease, serine, 15 (PRSS15), nuclear gene encoding mitochondrial protein
gcgagttgtgtgagccgccagtatggccgggctatggcggcgagcactggctacgtgcgactgtggggagcggcgcggtgctgggtgctgcggcggccgatgctggccgccgccggggggcgggttcccactgcagcaggagcgtggttgctccgaggccagcggacctgcgacgcctctcctccttgggcactgtggggccgaggcccggcaattgggggccaatggcgggggttttgggaagcgagcagccgcggcggaggcgcattctcggggggcgaggacgcctccgagggcggcgcggaggaaggagccggcggcgcggggggcagcgcgggcgccggggaaggcccggtcataacggcgctcacgcccatgacgatccccgatgtgtttccgcacctgccgctcatcgccatcacccgcaacccggtgttcccgcgctttatcaagattatcgaggttaaaaataagaagttggttgagctgctgagaaggaaagttcgtctcgcccagccttatgtcggcgtctttctaaagagagatgacagcaatgagtcggatgtggtcgagagcctggatgaaatctaccacacggggacgtttgcccagatccatgagatgcaggaccttggggacaagctgcgcatgatcgtcatgggacacagaagagtccatatcagcagacagctggaggtggagcccgaggagccggaggcggagaacaagcacaagccccgcaggaagtcaaagcggggcaagaaggaggcggaggacgagctgagcgccaggcacccggcggagctggcgatggagcccacccctgagctcccggctgaggtgctcatggtggaggtagagaacgttgtccacgaggacttccaggtcacggaggaggtgaaagccctgactgcagagatcgtgaagaccatccgggacatcattgccttgaaccctctctacagggagtcagtgctgcagatgatgcaggctggccagcgggtggtggacaaccccatctacctgagcgacatgggcgccgcgctcaccggggccgagtcccatgagctgcaggacgtcctggaagagaccaatattcctaagcggctgtacaaggccctctccctgctgaagaaggaatttgaactgagcaagctgcagcagcgcctggggcgggaggtggaggagaagatcaagcagacccaccgtaagtacctgctgcaggagcagctaaagatcatcaagaaggagctgggcctggagaaggacgacaaggatgccatcgaggagaagttccgggagcgcctgaaggagctcgtggtccccaagcacgtcatggatgttgtggacgaggagctgagcaagctgggcctgctggacaaccactcctcggagttcaatgtcacccgcaactacctagactggctcacgtccatcccttggggcaagtacagcaacgagaacctggacctggcgcgggcacaggcagtgctggaggaagaccactacggcatggaggacgtcaagaaacgcatcctggagttcattgccgttagccagctccgcggctccacccagggcaagatcctctgcttctatggcccccctggcgtgggtaagaccagcattgctcgctccatcgcccgcgccctgaaccgagagtacttccgcttcagcgtcgggggcatgactgacgtggctgagatcaagggccacaggcggacctacgtgggcgccatgcccgggaagatcatccagtgtttgaagaagaccaagacggagaaccccctgatcctcatcgacgaggtggacaagatcggccgaggctaccagggggacccgtcgtcggcactgctggagctgctggacccagagcagaatgccaacttcctggaccactacctggacgtgcccgtggacttgtccaaggtgctgttcatctgcacggccaacgtcacggacaccatccccgagccgctgcgagaccgtatggagatgatcaacgtgtcgggctacgtggcccaggagaagctggccattgcggagcgctacctggtgccccaggctcgcgccctgtgtggcttggatgagagcaaggccaagctgtcatcggacgtgctgacgctgctcatcaagcagtactgccgcgagagcggtgtccgcaacctgcagaagcaagtggagaaggtgttacggaaatcggcctacaagattgtcagcggcgaggccgagtccgtggaggtgacgcccgagaacctgcaggacttcgtggggaagcccgtgttcaccgtggagcgcatgtatgacgtgacaccgcccggcgtggtcatggggctggcctggaccgcaatgggaggctccacgctgtttgtggagacatccctgagacggccacaggacaaggatgccaagggtgacaaggatggcagcctggaggtgacaggccagctgggggaggtgatgaaggagagcgcccgcatagcctacaccttcgccagagccttcctcatgcagcacgcccccgccaatgactacctggtgacctcacacatccacctgcatgtgcccgagggcgccacccccaaggacggcccaagcgcaggctgcaccatcgtcacggccctgctgtccctggccatgggcaggcctgtccggcagaatctggccatgactggcgaagtctccctcacgggcaagatcctgcctgttggtggcatcaaggagaagaccattgcggccaagcgcgcaggggtgacgtgcatcgtcctgccagccgagaacaagaaggacttctacgacctggcagccttcatcaccgagggcctggaggtgcacttcgtggaacactaccgggagatcttcgacatcgccttcccggacgagcaggcagaggcgctggccgtggaacggtgacggccaccccgggactgcaggcggcggatgtcaggccctgtctgggccagaactgagcgctgtggggagcgcgcccggacctggcagtggagccaccgagcgagcagctcggtccagtgacccagatcccagggacctcagtcggcttaatcagagtgtggcatagaagctatttaatgattaaagtcatttgcagta

SEQ ID NO: 42 - DNA, 1485 bp, Homo sapiens
  mRNA (1)..(1485): gi|40354193|ref|NM_000224.2| Homo sapiens keratin 18 (KRT18), transcript variant 1
tccggggcgggggcggggcctcactctgcgatataactcgggtcgcgcggctcgcgcaggccgccaccgtcgtccgcaaagcctgagtcctgtcctttctctctccccggacagcatgagcttcaccactcgctccaccttctccaccaactaccggtccctgggctctgtccaggcgcccagctacggcgcccggccggtcagcagcgcggccagcgtctatgcaggcgctgggggctctggttcccggatctccgtgtcccgctccaccagcttcaggggcggcatggggtccgggggcctggccaccgggatagccgggggtctggcaggaatgggaggcatccagaacgagaaggagaccatgcaaagcctgaacgaccgcctggcctcttacctggacagagtgaggagcctggagaccgagaaccggaggctggagagcaaaatccgggagcacttggagaagaagggaccccaggtcagagactggagccattacttcaagatcatcgaggacctgagggctcagatcttcgcaaatactgtggacaatgcccgcatcgttctgcagattgacaatgcccgtcttgctgctgatgactttagagtcaagtatgagacagagctggccatgcgccagtctgtggagaacgacatccatgggctccgcaaggtcattgatgacaccaatatcacacgactgcagctggagacagagatcgaggctctcaaggaggagctgctcttcatgaagaagaaccacgaagaggaagtaaaaggcctacaagcccagattgccagctctgggttgaccgtggaggtagatgcccccaaatctcaggacctcgccaagatcatggcagacatccgggcccaatatgacgagctggctcggaagaaccgagaggagctagacaagtactggtctcagcagattgaggagagcaccacagtggtcaccacacagtctgctgaggttggagctgctgagacgacgctcacagagctgagacgtacagtccagtccttggagatcgacctggactccatgagaaatctgaaggccagcttggagaacagcctgagggaggtggaggcccgctacgccctacagatggagcagctcaacgggatcctgctgcaccttgagtcagagctggcacagacccgggcagagggacagcgccaggcccaggagtatgaggccctgctgaacatcaaggtcaagctggaggctgagatcgccacctaccgccgcctgctggaagatggcgaggactttaatcttggtgatgccttggacagcagcaactccatgcaaaccatccaaaagaccaccacccgccggatagtggatggcaaagtggtgtctgagaccaatgacaccaaagttctgaggcattaagccagcagaagcagggtaccctttggggagcaggaggccaataaaaagttcagagttcaaaaaaaaaaaaaaaaaaa

SEQ ID NO: 43 - DNA, 2113 bp, Homo sapiens
  mRNA (1)..(2113): gi|5803180|ref|NM_006819.1| Homo sapiens stress-induced-phosphoprotein 1 (Hsp70/Hsp90-organizing protein) (STIP1)
gtgcggttgggaacgcggagcggacggattcgattcaacggggttccggaccgcgctgcgctatggagcaggtcaatgagctgaaggagaaaggcaacaaggccctgagcgtgggtaacatcgatgatgccttacagtgctactccgaagctattaagctggatccccacaaccacgtgctgtacagcaaccgttctgctgcctatgccaagaaaggagactaccagaaggcttatgaggatggctgcaagactgtcgacctaaagcctgactggggcaagggctattcacgaaaagcagcagctctagagttcttaaaccgctttgaagaagccaagcgaacctatgaggagggcttaaaacacgaggcaaataaccctcaactgaaagagggtttacagaatatggaggccaggttggcagagagaaaattcatgaaccctttcaacatgcctaatctgtatcagaagttggagagtgatcccaggacaaggacactactcagtgatcctacctaccgggagctgatagagcagctacgaaacaagccttctgacctgggcacgaaactacaagatccccggatcatgaccactctcagcgtcctccttggggtcgatctgggcagtatggatgaggaggaagagattgcaacacctccaccaccaccccctcccaaaaaggagaccaagccagagccaatggaagaagatcttccagagaataagaagcaggcactgaaagaaaaagagctggggaacgatgcctacaagaagaaagactttgacacagccttgaagcattacgacaaagccaaggagctggaccccactaacatgacttacattaccaatcaagcagcggtatactttgaaaagggcgactacaataagtgccgggagctttgtgagaaggccattgaagtggggagagaaaaccgagaagactatcgacagattgccaaagcatatgctcgaattggcaactcctacttcaaagaagaaaagtacaaggatgccatccatttctataacaagtctctggcagagcaccgaaccccagatgtgctcaagaaatgccagcaggcagagaaaatcctgaaggagcaagagcggctggcctacataaaccccgacctggctttggaggagaagaacaaaggcaacgagtgttttcagaaaggggactatccccaggccatgaagcattatacagaagccatcaaaaggaacccgaaagatgccaaattatacagcaatcgagctgcctgctacaccaaactcctggagttccagctggcactcaaggactgtgaggaatgtatccagctggagccgaccttcatcaagggttatacacggaaagccgctgcgctggaagcgatgaaggactacaccaaagccatggatgtgtaccagaaggcgctagacctggactccagctgtaaggaggcggcagacggctaccagcgctgtatgatggcgcagtacaaccggcacgacagccccgaagatgtgaagcgacgagccatggccgaccctgaggtgcagcagatcatgagtgacccagccatgcgccttatcctggaacagatgcagaaggacccccaggcactcagcgaacacttaaagaatcctgtaatagcacagaagatccagaagctgatggatgtgggtctgattgcaattcggtgatgacttgttcatccccccttcccttcgccctcatgtggaaagaggagctgggaccgcggcgagcagcacggagcggaagggagagcaggggagagaaggcctcatctctctatatttatacataaccccggggaagacacagagactcgtacctgcgctgtttgtgccgccgctgcctctgggccctcccagcacacgcatggtctcttcaccgctgccctcgagttccatgtctctttcccctgcccctagttgctgtctcggctgctctcccatagttggttttttttttatttggggcagtgggcatgttatggggaggggagggggttcttccagcctcaggtcccagctgtctcacgttgtttattctgcgtccccttctccaataaaacaagccagttgggcgtggttataac

SEQ ID NO: 44 - DNA, 5861 bp, Homo sapiens; identical to SEQ ID NO: 36
  mRNA (1)..(5861): gi|51466356|ref|XM_379877.2| PREDICTED: Homo sapiens similar to Nuclear envelope pore membrane protein POM 121 (Pore membrane protein of 121 kDa) (P145) (LOC402556)

SEQ ID NO: 45 - DNA, 1135 bp, Homo sapiens
  mRNA (1)..(1135): gi|12056464|ref|NM_001436.2| Homo sapiens fibrillarin (FBL)
ggatccggcaacgaaggtaccatggccggactccggagccgcacaaaccagggctcgccatgaagccaggattcagtccccgtgggggtggctttggcggccgagggggctttggtgaccgtggtggtcgtggaggccgagggggctttggcgggggccgaggtcgaggcggaggctttagaggtcgtggacgaggaggaggtggaggcggcggcggcggtggaggaggaggaagaggtggtggaggcttccattctggtggcaaccggggtcgtggtcggggaggaaaaagaggaaaccagtcggggaagaatgtgatggtggagccgcatcggcatgagggtgtcttcatttgtcgaggaaaggaagatgcactggtcaccaagaacctggtccctggggaatcagtttatggagagaagagagtctcgatttcggaaggagatgacaaaattgagtaccgagcctggaaccccttccgctccaagctagcagcagcaatcctgggtggtgtggaccagatccacatcaaaccgggggctaaggttctctacctcggggctgcctcgggcaccacggtctcccatgtctctgacatcgttggtccggatggtctagtctatgcagtcgagttctcccaccgctctggccgtgacctcattaacttggccaagaagaggaccaacatcattcctgtgatcgaggatgctcgacacccacacaaataccgcatgctcatcgcaatggtggatgtgatctttgctgatgtggcccagccagaccagacccggattgtggccctgaatgcccacaccttcctgcgtaatggaggacactttgtgatttccattaaggccaactgcattgactccacagcctcagccgaggccgtgtttgcctccgaagtgaaaaagatgcaacaggagaacatgaagccgcaggagcagttgacccttgagccatatgaaagagaccatgccgtggtcgtgggagtgtacaggccaccccccaaggtgaagaactgaagttcagcgctgtcaggattgcgagagatgtgtgttgatactgttgcacgtgtgtttttctattaaaagactcatccgtcaaaaaaaaaaaaaaaaaaaaaaaaaaaaaa

SEQ ID NO: 46 - DNA, 3332 bp, Homo sapiens
  mRNA (1)..(3332): gi|41152055|ref|NM_004247.2| Homo sapiens elongation factor Tu GTP binding domain containing 2 (EFTUD2)
gggaactcttagctgagcaggcgagagcatcatggataccgacttatatgatgagtttgggaattatattggaccagagcttgattctgatgaagatgatgatgaattgggtagagagaccaaagatcttgatgagatggatgatgatgacgacgacgatgacgtaggagatcatgacgatgaccaccctgggatggaggtggtgctgcatgaggacaagaagtactacccaacagccgaggaggtgtatggtcctgaggtggagaccatagttcaagaggaagacactcagcctctcacagaacccattattaagccagtgaaaaccaagaaattcactctgatggagcagacattacctgttacggtgtatgagatggatttcttggcggatctgatggataactcagagctcatcagaaatgtgaccctttgtggacatctccaccatggcaagacatgttttgtggattgtttaattgaacagactcacccggaaatcagaaagcgctatgaccaagatctgtgctatactgacatcctcttcacagagcaagagagaggtgtaggcatcaaaagcactcctgtgacagtggtcttgccagacaccaaaggaaaatcttatctcttcaatatcatggacactccaggacatgtgaatttctctgatgaggtcacagctggcttgcgcatctcagatggagtggtccttttcattgatgctgctgagggggtgatgctgaacacagagcggctgatcaagcatgcggtgcaggagaggctggcagtcactgtgtgcatcaacaagattgaccggctgatcctggagctgaagctgcctccaactgatgcttattacaagctgcgccacattgtggatgaggtcaatggattaataagcatgtattccactgatgagaacctgatcctttccccactcctgggtaacgtctgcttctccagctcccagtacagcatctgcttcacgctggtctcctttgccaagatctatgccgacacctttggtgacattaattaccaagaatttgctaaaagactctggggtgacatctacttcaaccctaagacgcgaaagttcaccaaaaaggccccaactagcagctcccagagaagtttcgtggagtttatcttggagcctctttataagatcctcgcccaggttgtaggtgacgtggacaccagcctcccacggaccctagacgagcttggcatccacctgacgaaggaggagctgaagctgaacatccgccccttgctcaggctggtctgcaaaaagttctttggcgagttcacaggctttgtggacatgtgtgtgcagcatatcccttctccaaaggtgggcgccaagcccaagattgagcacacctacaccggtggtgtggactccgacctcggcgaggctatgagtgactgtgaccctgatggccccctgatgtgccacactactaagatgtacagcacagatgatggagtccagtttcacgcctttggccgggtgctgagtggcaccattcatgctgggcagcctgtgaaggtactgggggagaactacaccctggaggatgaggaagactcccagatatgcaccgtgggccgcctttggatctctgtggccaggtaccacatcgaggtgaaccgtgttcctgctggcaactgggttctgattgaaggtgttgatcaaccaattgtgaagacagcaaccataaccgaaccccgaggcaatgaggaggctcagattttccgacccttgaagttcaataccacatctgttatcaagattgctgtggagccagtcaacccctcagagctgcccaagatgcttgatggcctgcgcaaggtcaacaagagctatccatccctcaccaccaaggtggaggagtctggcgagcatgtgatcctgggcactggggagctctacctggactgtgtgatgcatgatttgcggaagatgtactcagagatagacatcaaggtggctgacccagttgtcacgttttgtgagacggtggtggaaacatcctccctcaagtgctttgctgaaacgcctaataagaagaacaagatcaccatgattgctgagcctcttgagaagggcctggcagaggacatagagaatgaggtggtccagattacgtggaacaggaagaagctgggagagttcttccagaccaagtacgattgggatctgctggctgcccgttccatctgggcttttggccctgatgcgactggccccaacattctggtggatgatactctgccctctgaggtggacaaggctcttcttggttcagtgaaggacagcatcgttcaaggtttccagtggggaaccagggagggccccctctgtgatgaattgattcggaatgtcaagtttaagatcctggatgcggtggttgcccaggagcccctgcaccggggcgggggccagatcatccccacagccaggagagtcgtctactctgccttcctcatggctactcctcgtctgatggagccttactactttgtagaggtccaggcccctgcagattgcgtctctgcagtttataccgtcctggccaggcgcagggggcacgtgactcaggatgcacccatcccaggctcccctctgtacaccatcaaagcttttatcccggccatcgactcttttggctttgagactgatctccggactcacacccagggacaagccttttctctgtctgtcttccaccactggcagattgtgcctggtgatcccctggacaagagcattgtcatccgccccttggagccacagccagctcctcacctggcccgggaattcatgatcaaaacccgccgtaggaagggcctcagtgaagatgtgagcatcagcaaattcttcgatgatcctatgttgctggaacttgccaaacaggatgttgtgctcaattaccccatgtgagtgcgtggactcctgggagctcctgctccctacagtgggctgcaactcctgtacttgaagctgagacctcatatgacgtggccttcgtgttgtcagagagtgtctggaagctgctgttgccatcttgaacaactcaccaacctccaacccagagccccagtgagagaggagcatttggcctcctgcttccttctgtggcctctgccgggctccattcccaaggaaaagagaggagcttgggctcacagaaagagaaggggatgaaaccccaaggggccctatctttgggatttacatggaattttattttctacaagtttgaccttagccatggtttgcaagtgaacagaacattctgacctcaaaaaaaaaaaaaaaaaaa

SEQ ID NO: 47 - DNA, 1348 bp, Homo sapiens
  mRNA (1)..(1348): gi|76496470|ref|NM_000967.3| Homo sapiens ribosomal protein L3 (RPL3), transcript variant 1
ccagatttggctttatatagcggacccgtaaggccgaccggcctctaccggcgggatttgatggcgtgatgtctcacagaaagttctccgctcccagacatgggtccctcggcttcctgcctcggaagcgcagcagcaggcatcgtgggaaggtgaagagcttccctaaggatgacccgtccaagccggtccacctcacagccttcctgggatacaaggctggcatgactcacatcgtgcgggaagtcgacaggccgggatccaaggtgaacaagaaggaggtggtggaggctgtgaccattgtagagacaccacccatggtggttgtgggcattgtgggctacgtggaaacccctcgaggcctccggaccttcaagactgtctttgctgagcacatcagtgatgaatgcaagaggcgtttctataagaattggcataaatctaagaagaaggcctttaccaagtactgcaagaaatggcaggatgaggatggcaagaagcagctggagaaggacttcagcagcatgaagaagtactgccaagtcatccgtgtcattgcccacacccagatgcgcctgcttcctctgcgccagaagaaggcccacctgatggagatccaggtgaacggaggcactgtggccgagaagctggactgggcccgcgagaggcttgagcagcaggtacctgtgaaccaagtgtttgggcaggatgagatgatcgacgtcatcggggtgaccaagggcaaaggctacaaaggggtcaccagtcgttggcacaccaagaagctgccccgcaagacccaccgaggcctgcgcaaggtggcctgtattggggcatggcatcctgctcgtgtagccttctctgtggcacgcgctgggcagaaaggctaccatcaccgcactgagatcaacaagaagatttataagattggccagggctaccttatcaaggacggcaagctgatcaagaacaatgcctccactgactatgacctatctgacaagagcatcaaccctctgggtggctttgtccactatggtgaagtgaccaatgactttgtcatgctgaaaggctgtgtggtgggaaccaagaagcgggtgctcaccctccgcaagtccttgctggtgcagacgaagcggcgggctctggagaagattgaccttaagttcattgacaccacctccaagtttggccatggccgcttccagaccatggaggagaagaaagcattcatgggaccactgaagaaagaccgaattgcaaaggaagaaggagcttaatgccaggaacagattttgcagttggtggggtctcaataaaagttattttccactgacaaaaaaaaaaa

SEQ ID NO: 48 - DNA, 3091 bp, Homo sapiens
  mRNA (1)..(3091): gi|40807442|ref|NM_199413.1| Homo sapiens protein regulator of cytokinesis 1 (PRC1), transcript variant 2
gcttcgccccgtggcgcggtttgaaattttgcggggctcaacggctcgcggagcggctacgcggagtgacatcgccggtgtttgcgggtggttgttgctctcggggccgtgtggagtaggtctggacctggactcacggctgcttggagcgtccgccatgaggagaagtgaggtgctggcggaggagtccatagtatgtctgcagaaagccctaaatcaccttcgggaaatatgggagctaattgggattccagaggaccagcggttacaaagaactgaggtggtaaagaagcatatcaaggaactcctggatatgatgattgctgaagaggaaagcctgaaggaaagactcatcaaaagcatatccgtctgtcagaaagagctgaacactctgtgcagcgagttacatgttgagccatttcaggaagaaggagagacgaccatcttgcaactagaaaaagatttgcgcacccaagtggaattgatgcgaaaacagaaaaaggagagaaaacaggaactgaagctacttcaagagcaagatcaagaactgtgcgaaattctttgtatgccccactatgatattgacagtgcctcagtgcccagcttagaagagctgaaccagttcaggcaacatgtgacaactttgagggaaacaaaggcttctaggcgtgaggagtttgtcagtataaagagacagatcatactgtgtatggaagaattagaccacaccccagacacaagctttgaaagagatgtggtgtgtgaagacgaagatgccttttgtttgtctttggagaatattgcaacactacaaaagttgctacggcagctggaaatgcagaaatcacaaaatgaagcagtgtgtgaggggctgcgtactcaaatccgagagctctgggacaggttgcaaatacctgaagaagaaagagaagctgtggccaccattatgtctgggtcaaaggccaaggtccggaaagcgctgcaattagaagtggatcggttggaagaactgaaaatgcaaaacatgaagaaagtgattgaggcaattcgagtggagctggttcagtactgggaccagtgcttttatagccaggagcagagacaagcttttgcccctttctgtgctgaggactacacagaaagtctgctccagctccacgatgctgagattgtgcggttaaaaaactactatgaagttcacaaggaactctttgaaggtgtccagaagtgggaagaaacctggaggcttttcttagagtttgagagaaaagcttcagatccaaatcgatttacaaaccgaggaggaaatcttctaaaagaagaaaaacaacgagccaagctccagaaaatgctgcccaagctggaagaagagttgaaggcacgaattgaattgtgggaacaggaacattcaaaggcatttatggtgaatgggcagaaattcatggagtatgtggcagaacaatgggagatgcatcgattggagaaagagagagccaagcaggaaagacaactgaagaacaaaaaacagacagagacagagatgctgtatggcagcgctcctcgaacacctagcaagcggcgaggactggctcccaatacaccgggcaaagcacgtaagctgaacactaccaccatgtccaatgctacggccaatagtagcattcggcctatctttggagggacagtctaccactcccccgtgtctcgacttcctccttctggcagcaagccagtcgctgcttccacctgttcagggaagaaaacaccccgtactggcaggcatggagccaacaaggagaacctggagctcaacggcagcatcctgagtggtgggtaccctggctcggcccccctccagcgcaacttcagcattaattctgttgccagcacctattctgagtttgcgcgagaactttcaaaggcttccaaatctgatgctacttctggaatcctcaattcaaccaacatccagtcctgagaagccctgatcagtcaaccagctgtggcttcctgtgcctagactggacctaattatatgggggtgactttagtttttcttcagcttaggcgtgcttgaaaccttggccaggttccatgaccatgggcctaacttaaagatgtgaatgagtgttacagttgaaagcccatcataggtttagtggtcctaggagacttggttttgacttatatacatgaaaagtttatggcaagaagtgcaaattttagcatatggggcctgacttctctaccacataattctacttgctgaagcatgatcaaagcttgttttatttcaccactgtaggaaaatgattgactatgcccatccctgggggtaattttggcatgtatacctgtaactagtaattaacatcttttttgtttaggcatgttcaattaatgctgtagctatcatagctttgctcttacctgaagccttgtccccaccacacaggacagccttcctcctgaagagaatgtctttgtgtgtccgaagttgagatggcctgccctactgccaaagaggtgacaggaaggctgggagcagctttgttaaattgtgttcagttctgttacacagtgcattgccctttgttgggggtatgcatgtatgaacacacatgcttgtcggaacgctttctcggcgtttgtcccttggctctcatctcccccattcctgtgcctactttgcctgagttcttctacccccgcagttgccagccacattgggagtctgtttgttccaatgggttgagctgtctttgtcgtggagatctggaactttgcacatgtcactactggggaggtgttcctgctctagcttccacgatgaggcgccctctttacctatcctctcaatcactactcttcttgaagcactattatttattcttccgctgtctgcctgcagcagtactactgtcaacatagtgtaaatggttctcaaaagcttaccagtgtggacttggtgttagccacgctgtttactcatacagtacgtgtcctgtttttaaaatatacaattattcttaaaaataaattaaaatctgtatacttacatttcaaaaagaaaaaaaaaaaaaaaaaaaaa

SEQ ID NO: 49 - DNA, 1285 bp, Homo sapiens
  mRNA (1)..(1285): gi|36054181|ref|NM_032044.2| Homo sapiens regenerating islet-derived family, member 4 (REG4)
ataagacttttatggatggattgtttttctcaaataatattatcgctttgtgactaaagtaaagattattaattcctgaggcaagaagatataaaagctccagaaacgttgactgggaccactggagacactgaagaaggcaggggcccttagagtcttggttgccaaacagatttgcagatcaaggagaacccaggagtttcaaagaagcgctagtaaggtctctgagatccttgcactagctacatcctcagggtaggaggaagatggcttccagaagcatgcggctgctcctattgctgagctgcctggccaaaacaggagtcctgggtgatatcatcatgagacccagctgtgctcctggatggttttaccacaagtccaattgctatggttacttcaggaagctgaggaactggtctgatgccgagctcgagtgtcagtcttacggaaacggagcccacctggcatctatcctgagtttaaaggaagccagcaccatagcagagtacataagtggctatcagagaagccagccgatatggattggcctgcacgacccacagaagaggcagcagtggcagtggattgatggggccatgtatctgtacagatcctggtctggcaagtccatgggtgggaacaagcactgtgctgagatgagctccaataacaactttttaacttggagcagcaacgaatgcaacaagcgccaacacttcctgtgcaagtaccgaccatagagcaagaatcaagattctgctaactcctgcacagccccgtcctcttcctttctgctagcctggctaaatctgctcattatttcagaggggaaacctagcaaactaagagtgataagggccctactacactggcttttttaggcttagagacagaaactttagcattggcccagtagtggcttctagctctaaatgtttgccccgccatccctttccacagtatccttcttccctcctcccctgtctctggctgtctcgagcagtctagaagagtgcatctccagcctatgaaacagctgggtctttggccataagaagtaaagatttgaagacagaaggaagaaactcaggagtaagcttctagaccccttcagcttctacacccttctgccctctctccattgcctgcaccccaccccagccactcaactcctgcttgtttttcctttggccataggaaggtttaccagtagaatccttgctaggttgatgtgggccatacattcctttaataaaccattgtgtacataagaaaaaaaaaa

SEQ ID NO: 50 - DNA, 3188 bp, Homo sapiens
  mRNA (1)..(3188): gi|7019572|ref|NM_013403.1| Homo sapiens striatin, calmodulin binding protein 4 (STRN4)
atgatggaggagcgagcggccgccgcggtcgccgccgccgcctcctcctgccgtccgctcggctcaggcgcgggccctggccccactggggcggccccggtctccgcccctgcccccgggccgggcccggcaggtaagggaggcggcggcggaggcagccccgggcccacggcgggcccggagcccctgagcctgccggggatcctgcactttatccagcacgagtgggcgcgcttcgaagccgagaaagcccgctgggaggccgagcgcgccgagttacaggctcaggtggccttccttcagggagagaggaaagggcaggagaatctaaagacggacctggtgcggcggatcaagatgctagagtatgcgctgaagcaggaaagggccaaatatcataaactgaagtttgggacagacctgaaccagggggagaagaaagcagatgtgtcagaacaagtctccaatggccccgtggaatcggtcaccctggagaacagcccgttggtgtggaaggaggggcggcagcttctccgacagtacctggaagaggtgggctacacagacaccatcctcgacatgcggtccaagcgcgtccgttccctgctgggccgctcgctggagctcaacggggcagtggagccgagtgaaggggcccccagggctccaccaggccctgcagggctcagtggtggggagtcgctgctggtgaaacagatcgaggagcagataaagaggaacgcggcaggcaaagatggcaaagagcgcttgggcggctcagtgctggggcagatccccttcctgcagaactgcgaggacgaagacagcgacgaggacgatgagctggacagcgtgcagcacaagaagcagcgtgtgaagctcccatccaaggctctggtgcccgaaatggaagacgaggatgaggaagacgactctgaggatgctatcaatgagtttgatttcctgggctcaggagaggatggggaaggggctccagaccctcggcggtgcactgtggatgggagcccccatgagctggaaagccgtcgggtcaaactccaaggcgttctggctgacctgcgggatgtggatgggctgcccccaaaagtgactggcccgcctcctggcacaccccagccccggccacatgaagacgtcttcatcatggacactatcgggggcggggaggtgagcctgggggacttggcagatctcaccgtcaccaacgacaacgacctcagctgcgatctgtctgacagcaaagatgcttttaagaagacgtggaaccccaagttcaccctgcgctcgcactacgacggcattcgttccctggccttccaccacagccagtcggctctgctcaccgcctccgaggacggcacgctcaagctctggaacctgcagaaggcggtcacggccaagaagaatgcggcgctagatgtggaacctatacatgctttccgggctcacaggggcccagtgttggctgtggctatgggcagcaacagtgaatactgctacagtggcggggcagatgcctgcatccatagttggaagattccagacctcagcatggatccctatgatggctacgacccaagcgtgctgagccacgtcctggagggccacggggacgccgtgtggggcctggccttcagtcccacctcccagcgcctggcctcctgttctgctgatggcaccgtccgcatctgggaccccagcagcagcagcccggcctgcctctgcaccttccccacagccagcgagcacggggtccccacctcagtggccttcaccagcaccgagcctgcccacatcgtggcctccttccgctctggcgacaccgtcttgtatgacatggaggttggcagtgccctcctcacgctggagtcccggggcagcagcggtccaacccagatcaaccaagtggtgagtcatccaaaccagcctctcaccatcaccgcccacgacgacaggggcatccgcttcctggacaatcggacaggtaagccggtgcactccatggttgcacacctggacgcagtcacctgcctagccgtggaccccaacggcgcattcctgatgtcaggaagccatgactgctccctgcgtctctggagcctggacaacaaaacgtgcgtgcaggagatcacggcccaccgcaagaagcacgaggaggccatccacgctgttgcctgccaccccagcaaggccctcattgccagtgctggcgctgatgccctggccaaggtcttcgtatgatgcccacctggccctgccctggccgccacgctggctggggtgtagggccgggcaggtggggctgaggggactcccagcctcgctggaggtgcagaggcctggcctctgtctgtttgccatggagcctggtggtgctaacggccctttccccaggaatccctccccaacggctgccttccccaagcatccagcctggggatgggcccctttcaggaatcacccccgaggatggcctcggggtttccccctgtgccctgacagccgctcctggtatcagagctgctttccagagggcagcacagccagggccgggtgtctttagggatcagtttttccaagactccagaaggtgccaggttctccccttgagctcctgctcccccatcccccatcctcccagacctgggcaggagctgtgctgggagaaagggtggcagccgggagcctcagagctgagccccggcctggctgcccctcccctccggccctctccactgctttccagacactaaccaaggcttccaggccagggattgcccaacactcctagggcagccctcccagcgccccatggggtcgcccatgggtagagacggctttcttgtgcccctccctggggcatggagggtggagtgggcctcgggtccccctgaactccctgtatatctgtataaataacgggattttcatggcgccgccccacccgcattatcactgtgtgatggtctcagtcagtctcctccctgtctccactctttccctctatttatttcactctcttgtttggttctaccctgcaccctcggtccccttccaggttcctgtttataagccccaacccctctgtccccatcttgtatgtgaaaacttgtctcaataaaccctttggagtaaaaaaaaaaaaaaaaaaaaaaaaaaaaaaaaaa

SEQ ID NO: 51 - DNA, 3106 bp, Homo sapiens
  mRNA (1)..(3106): gi|40807484|ref|NM_012469.2| Homo sapiens chromosome 20 open reading frame 14 (C20orf14)
tctgcttccggggcgcgggtgacgcgacgacggcgacactttgctacggagtgcatcggacgtcgaagcctagagtctctgcgtctttccctcttccgctgcctcattcctttccttcctagccttggtcgtcgccgccaccatgaacaagaagaagaaaccgttcctagggatgcccgcgcccctcggctacgtgccggggctgggccggggcgccactggcttcaccacgcggtcagacattgggcccgcccgtgatgcaaatgaccctgtggatgatcgccatgcacccccaggcaagagaaccgttggggaccagatgaagaaaaatcaggctgctgacgatgacgacgaggatctaaatgacaccaattacgatgagtttaatggctatgctgggagcctcttctcaagtggaccctacgagaaagatgatgaggaagcagatgctatctatgcagccctggataaaaggatggatgaaagaagaaaagaaagacgggagcaaagggagaaagaagaaatagagaaatatcgtatggaacgccccaaaatccaacagcagttctcagacctcaagaggaagttggcagaagtcacagaagaagagtggctgagcatccccgaggttggcgatgccagaaataaacgtcagcggaacccacgctatgagaagctgacccctgttcctgacagtttctttgccaaacatttacagaccggagagaaccatacctcagtggatccccgacaaactcaatttggaggtcttaacacaccctatccaggtggactaaacactccatacccaggtggaatgacgccaggactgatgacacctggcacaggtgagctggacatgaggaagattggccaagcgaggaacactctgatggacatgaggctgagccaggtgtctgactccgtgagtggacagaccgtcgttgaccccaaaggctacctgacggatttaaattccatgatcccgacacacggaggagacatcaatgatatcaagaaggcgcgactgctcctcaagtctgttcgggagacgaaccctcatcacccgccagcctggattgcatcagcccgcctggaagaagtcactgggaagctacaagtagctcggaaccttatcatgaaggggacggagatgtgccccaagagtgaagatgtctggctggaagcagccaggttgcagcctggggacacagccaaggccgtggtagcccaagctgtccgtcatctcccacagtctgtcaggatttacatcagagccgcagagctggaaacggacattcgtgcaaagaagcgggttcttcggaaagccctcgagcatgttccaaactcggttcgcttgtggaaagcagccgttgagctggaagaacctgaagatgctagaatcatgctgagccgagctgtggagtgctgccccaccagcgtggagctctggcttgctctggcaaggctggagacctatgaaaatgcccgcaaggtcttgaacaaggcgcgggagaacattcctacagaccgacatatctggatcacggctgctaagctggaggaagccaatgggaacacgcagatggtggagaagatcatcgaccgagccatcacctcgctgcgggccaacggtgtggagatcaaccgtgagcagtggatccaggatgccgaggaatgtgacagggctgggagtgtggccacctgccaggccgtcatgcgtgccgtgattgggattgggattgaggaggaagatcggaagcatacctggatggaggatgctgacagttgtgtagcccacaatgccctggagtgtgcacgagccatctacgcctacgccctgcaggtgttccccagcaagaagagtgtgtggctgcgcgccgcgtacttcgagaagaaccatggcactcgggagtccctggaagcactcctgcagagggctgtggcccactgccccaaagcagaggtgctgtggctcatgggcgccaagtccaagtggctggcaggggatgtgcctgcagcaaggagcatcctggccctggccttccaggccaaccccaacagtgaggagatctggctggcagccgtgaagctggagtccgagaatgatgagtacgagcgggcccggaggctgctggccaaggcgcggagcagtgcccccaccgcccgggtgttcatgaagtctgtgaagctggagtgggtgcaagacaacatcagggcagcccaagatctgtgcgaggaggccctgcggcactatgaggacttccccaagctgtggatgatgaaggggcagatcgaggagcagaaggagatgatggagaaggcgcgggaagcctataaccaggggttgaagaagtgtccccactccacacccctgtggcttttgctctctcggctggaggagaagattgggcagcttactcgagcacgggccattttggaaaagtctcgtctgaagaacccaaagaaccctgggctgtggttggagtccgtgcggctggagtaccgtgcggggctgaagaacatcgcaaatacactcatggccaaggcgctgcaggagtgccccaactccggtatcctgtggtctgaggccatcttcctcgaggcaaggccccagaggaggaccaagagcgtggatgccctgaagaagtgtgagcatgacccccatgtgctcctggccgtggccaagctgttttggagtcagcggaagatcaccaaggccagggagtggttccaccgcactgtgaagattgactcggacctgggggatgcctgggccttcttctacaagtttgagctgcagcatggcactgaggagcagcaggaggaggtgaggaagcgctgtgagagtgcagagcctcggcatggggagctgtggtgcgccgtgtccaaggacatcgccaactggcagaagaagatcggggacatccttaggctggtggccggccgcatcaagaacaccttctgattgagcggttgccatggccggtctccgtggggcagggttgggccgcatgtggaagggctctgagctgtgtcctccttcattaaaagtttttatgtctcgtgtcagaaaaaaaaaaaaaaaaaaaaaaaaaaaaaaaaa

SEQ ID NO: 52 - DNA, 3762 bp, Homo sapiens
  mRNA (1)..(3762): gi|20149523|ref|NM_003169.2| Homo sapiens suppressor of Ty 5 homolog (S. cerevisiae) (SUPT5H)
agagaacagattcggaaactggggaggtctagcatgtggcgtaggagggggtcctcactccgcttcgcgattgccaaaacgagcctgccggaagcgccctaaggggttttcttctcccagggaaccagcggggaaactgaggctcggggtggagcgcaggattgtgggacgcgccaagactgctgtctttcccagcagcagcggaagatgtcggacagcgaggacagcaacttttccgaggaggaggacagcgagcgcagcagtgacggcgaggaggccgaggtagacgaagagcggcggagtgcagcgggcagtgagaaagaagaagagcctgaggacgaagaggaggaggaagaggaggaggaatatgatgaggaagaggaggaagaagatgatgaccgaccccccaagaaaccccgccatggaggcttcattctggacgaggctgatgttgacgatgagtatgaggacgaggaccagtgggaggatggagcagaggacattctagagaaagaagagattgaagcctccaatatcgataatgttgtcctggatgaagatcgttctggggctcgccgcctgcaaaacctctggagggaccagcgagaagaagaactgggcgagtattacatgaagaaatacgccaagtcatctgtgggagagacggtgtatggaggatctgatgagctctcagacgacatcacccagcagcagctgctcccaggagtcaaggatcccaatctgtggactgtcaaatgtaagattggggaggaacgggccacggccatttccttgatgcgcaagttcattgcctaccagttcacagacacgcccctgcagatcaagtcagtagtggcaccagagcatgtgaagggctacatctacgtggaggcctacaagcagacccacgtgaagcaggccattgagggggtgggcaacctgcggcttggctactggaaccagcagatggtgcccatcaaggagatgacagacgtgctcaaagtggtgaaggaggtggccaacctgaaaccaaagtcctgggtccgcctcaagcggggcatctacaaggatgacattgctcaggtggactacgtggagcccagccagaacaccatctccctgaagatgatcccacgcatcgactacgatcgcatcaaggcccgcatgagcttgaaagactggtttgccaaaaggaagaagtttaagcggcctccacagaggctgtttgatgctgagaagatcaggtccctggggggtgatgttgcctctgatggtgacttcctcatctttgaggggaaccgttacagccggaagggctttctgttcaagagcttcgccatgtctgctgtgatcacggagggtgtgaagccaacactctctgagctggaaaagtttgaggaccagccagagggcattgacctggaggtggtgactgagagcacagggaaggagcgggagcacaacttccaacctggggacaacgtggaggtctgtgagggtgagctcatcaacctgcagggcaagatcctcagcgtggatggcaacaagatcaccatcatgcccaagcatgaggacctcaaggacatgttggagttcccagcccaggaacttagaaaatacttcaagatgggggaccacgtgaaggtgattgctggccgattcgagggcgacacaggcctcattgtgcgggtggaggagaatttcgttatcctgttctctgacctcaccatgcatgagctgaaggtgctcccccgggacctgcagctctgctcagagacagcatcaggtgtggatgttgggggccagcatgaatggggcgagctggtgcagctggatccccagactgtgggtgtcatcgtgcgactagaacgggagaccttccaggtgctgaacatgtacgggaaggtggtgactgtcagacatcaggctgtgacccggaagaaggacaaccgctttgctgtggccttggactcagagcagaacaacatccatgtgaaagacatcgttaaggtcattgatggcccccactcaggccgagaaggggagattcgccatctcttccgaagcttcgccttcctacattgcaagaaactggtggagaacgggggcatgtttgtctgcaagacccgccacctggtgctggctgggggctcaaagccccgtgatgtgaccaacttcaccgtgggtggctttgcgcctatgagtccccggatcagcagccccatgcaccccagtgctggaggtcagcgtggcggctttggtagcccaggtggcggcagtggtggcatgagcaggggccggggccggagggacaacgaactcatcggccagaccgtgcgcatctcccaggggccctacaaaggctacatcggtgtggtgaaagatgccacagagtccacggcccgtgtggagctgcactccacctgccagaccatctctgtggaccgtcagcggctcaccacggtgggctcacggcgcccgggcggcatgacctcgacctatgggaggacgcccatgtatggctcccagacgcccatgtatggctctggctcccgaacacccatgtacggctcacagacacccctccaggatggtagccgcaccccacactacggctcacagacgcccctgcatgatggcagccgcactcctgcccagagtggggcctgggaccccaacaaccccaacacgccgtcacgggctgaggaagaatatgagtatgctttcgatgatgagcccaccccgtccccgcaggcctatgggggaacccccaatccccaaacacctggctacccagacccctcgtccccacaggtcaacccacaatacaacccgcagacgccagggacgccggccatgtacaacacagaccagttctctccctatgctgccccctccccacaaggttcctaccagcccagccccagcccccagagctaccaccaggtggcgccaagcccagcaggctaccagaatacccactccccagccagctaccaccctacaccgtcgcccatggcctatcaggctagccccagcccgagccccgttggctacagtcctatgacacctggagctccctcccctggtggctacaacccacacacgccaggctcaggcatcgagcagaactccagcgactgggtaaccactgacattcaggtgaaggtgcgggacacctacctggatacacaggtggtgggacagacaggtgtcatccgcagtgtcacggggggcatgtgctctgtgtacctgaaggacagtgagaaggttgtcagcatttccagtgagcacctggagcctatcacccccaccaagaacaacaaggtgaaagtgatcctgggcgaggatcgggaagccacgggcgtcctactgagcattgatggtgaggatggcattgtccgtatggaccttgatgagcagctcaagatcctcaacctccgcttcctggggaagctcctggaagcctgaagcaggcagggccggtggacttcgtcggatgaagagtgatcctccttccttccctggcccttggctgtgacacaagatcctcctgcagggctaggcggattgttctggatttccttttgtttttccttttagttttccatcttttccctccctggtgctcattggaatctgagtagagtctgggggagggtccccaccttcctgtacctcctccccacagcttgcttttgttgtaccgtctttcaataaaaagaagctgtttggtctaaaaaaaaaaaaaaaaaaaaaaaa

SEQ ID NO: 53 - DNA, 2920 bp, Homo sapiens
  mRNA (1)..(2920): gi|48255912|ref|NM_006470.3| Homo sapiens tripartite motif-containing 16 (TRIM16)
gatttatggaaagcacctggtgcgtgttctgccctctgaggaccctgccctttcccaaaaggggtatcttaagaaggaaaatatggctgctctttgccggacagcagagtcccagtaggatttccattttccaaacctggtatcatctcctagttggaagaagtggtaagcccacgaacacaaatgcaggagggagaggtgccaagaagcagcggtacacagcaggcacagagacacgtggtcttcagcagagcctatggggttcagatgattcacataagaatagaagtttcagggctggacctggggaggcagcctgagcctgagccggctgtcctgagcctgagtactctagctgccttgtcgtcatcgcatctggctgccatccagcgccagcacacagtaatgagtggccgagcttcctctgggagggaggaaacagttaaaatcttgcagcagctgcaatcatctaggcgtggttctcttgtctgacttgggctgcacagatcctgggccaagggacagaagaaagacagcctaggagcagagcctcccagatggctgagttggatctaatggctccagggccactgcccagggccactgctcagcccccagcccctctcagcccagactctgggtcacccagcccagattctgggtcagccagcccagtggaagaagaggacgtgggctcctcggagaagcttggcagggagacggaggaacaggacagcgactctgcagagcagggggatcctgctggtgaggggaaagaggtcctgtgtgacttctgccttgatgacaccagaagagtgaaggcagtgaagtcctgtctaacctgcatggtgaattactgtgaagagcacttgcagccgcatcaggtgaacatcaaactgcaaagccacctgctgaccgagccagtgaaggaccacaactggcgatactgccctgcccaccacagcccactgtctgccttctgctgccctgatcagcagtgcatctgccaggactgttgccaggagcacagtggccacaccatagtctccctggatgcagcccgcagggacaaggaggctgaactccagtgcacccagttagacttggagcggaaactcaagttgaatgaaaatgccatctccaggctccaggctaaccaaaagtctgttctggtgtcggtgtcagaggtcaaagcggtggctgaaatgcagtttggggaactccttgctgctgtgaggaaggcccaggccaatgtgatgctcttcttagaggagaaggagcaagctgcgctgagccaggccaacggtatcaaggcccacctggagtacaggagtgccgagatggagaagagcaagcaggagctggagaggatggcggccatcagcaacactgtccagttcttggaggagtactgcaagtttaagaacactgaagacatcaccttccctagtgtttacgtagggctgaaggataaactctcgggcatccgcaaagttatcacggaatccactgtacacttaatccagttgctggagaactataagaaaaagctccaggagttttccaaggaagaggagtatgacatcagaactcaagtgtctgccgttgttcagcgcaaatattggacttccaaacctgagcccagcaccagggaacagttcctccaatatgcgtatgacatcacgtttgacccggacacagcacacaagtatctccggctgcaggaggagaaccgcaaggtcaccaacaccacgccctgggagcatccctacccggacctccccagcaggttcctgcactggcggcaggtgctgtcccagcagagtctgtacctgcacaggtactattttgaggtggagatcttcggggcaggcacctatgttggcctgacctgcaaaggcatcgaccggaaaggggaggagcgcaacagttgcatttccggaaacaacttctcctggagcctccaatggaacgggaaggagttcacggcctggtacagtgacatggagaccccactcaaagctggccctttccggaggctcggggtctatatcgacttcccgggagggatcctttccttctatggcgtagagtatgataccatgactctggttcacaagtttgcctgcaaattttcagaaccagtctatgctgccttctggctttccaagaaggaaaacgccatccggattgtagatctgggagaggaacccgagaagccagcaccgtccttggtggggactgctccctagactccaggagccatatcccagacctttgccagctacagtgatgggatttgcattttagggtgatttgggggcagaaataactgctgatggtagctggcttttgaaatcctatggggtctctgaatgaaaacattctccagctgctctcttttgctccatatggtgctgttctctatgtgtttgcagtaattcttttttttttttttgagacggagtctcgcactgttgcccaggctggagagcagtggcgcgatcttggctcactgcaagctccgcctcccgagttcaagcaattctcctgcctcagcctcccgagtagctgggattacaggtgcctgccaccacacccagctaatgttttgtatttttagtagagatggggtttcaccatgttggccaggcagatctcaaactcctgacctcgtgatgcacccacctcggcctcccaaagtgctgggattacatgcgtgagccactgcgccctgcctgtttgtagtaatttttaggcaccaaatctccctcatcttctagtgccattctcctctctgttcaggtaaatgtcacactgtgcccagaatggatgaccaggaaccttaaagagtggctgaaaagattgcagagttatcataataaattgctaacttgcgtaaaaaaaaaaaaaaaaaaaa

SEQ ID NO: 54 - DNA, 3192 bp, Homo sapiens
  mRNA (1)..(3192): gi|12056467|ref|NM_021991.1| Homo sapiens junction plakoglobin (JUP), transcript variant 2
cgccagagtccggagcagccgccgcccgaccgcgccgagctcagttcgctgtccgcgccggctcccaccccggcccgaccccgacccggcccggtcaggccccatactcagtagccacgatggaggtgatgaacctgatggagcagcctatcaaggtgactgagtggcagcagacatacacctacgactcgggtatccactcgggcgccaacacctgcgtgccctccgtcagcagcaagggcatcatggaggaggatgaggcctgcgggcgccagtacacgctcaagaaaaccaccacttacacccagggggtgccccccagccaaggtgacctggagtaccagatgtccacaacagccagggccaaacgggtgcgggaggccatgtgccctggtgtgtcaggcgaggacagctcgcttctgctggccacccaggtggaggggcaggccaccaacctgcagcgactggccgagccgtcccagctgctcaagtcggccattgtgcatctcatcaactaccaggacgatgccgagctggccactcgcgccctgcccgagctcaccaaactgctcaacgacgaggacccggtggtggtgaccaaggcggccatgattgtgaaccagctgtcgaagaaggaggcgtcgcggcgggccctgatgggctcgccccagctggtggccgctgtcgtgcgtaccatgcagaataccagcgacctggacacagcccgctgcaccaccagcatcctgcacaacctctcccaccaccgggaggggctgctcgccatcttcaagtcgggtggcatccctgctctggtccgcatgctcagctcccctgtggagtcggtcctgttctatgccatcaccacgctgcacaacctgctcctgtaccaggagggcgccaagatggccgtgcgcctggccgacgggctgcaaaagatggtgcccctgctcaacaagaacaaccccaagttcctggccatcaccaccgactgcctgcagctcctggcctacggcaaccaggagagcaagctgatcatcctggccaatggtgggccccaggccctcgtgcagatcatgcgtaactacagttatgaaaagctgctctggaccaccagtcgtgtgctcaaggtgctatccgtgtgtcccagcaataagcctgccattgtggaggctggtgggatgcaggccctgggcaagcacctgaccagcaacagcccccgcctggtgcagaactgcctgtggaccctgcgcaacctctcagatgtggccaccaagcaggagggcctggagagtgtgctgaagattctggtgaatcagctgagtgtggatgacgtcaacgtcctcacctgtgccacgggcacactctccaacctgacatgcaacaacagcaagaacaagacgctggtgacacagaacagcggtgtggaggctctcatccatgccatcctgcgtgctggtgacaaggacgacatcacggagcctgccgtctgcgctctgcgccacctcactagccgccaccctgaggccgagatggcccagaactctgtgcgtctcaactatggcatcccagccatcgtgaagctgctcaaccagcccaaccagtggccactggtcaaggcaaccatcggcttgatcaggaatctggccctgtgcccagccaaccatgccccgctgcaggaggcagcggtcatcccccgcctcgtccaactgctggtgaaggcccaccaggatgcccagcgccacgtagctgcaggcacacagcagccctacacggatggtgtgaggatggaggagattgtggagggctgcaccggagcactgcacatcctcgcccgggaccccatgaaccgcatggagatcttccggctcaacaccattcccctgtttgtgcagctcctgtactcgtcggtggagaacatccagcgcgtggctgccggggtgctgtgtgagctggcccaggacaaggaggcggccgacgccattgatgcagagggggcctcggccccactcatggagttgctgcactcccgcaacgagggcactgccacctacgctgctgccgtcctgttccgcatctccgaggacaagaacccagactaccggaagcgcgtgtccgtggagctcaccaactccctcttcaagcatgacccggctgcctgggaggctgcccagagcatgattcccatcaatgagccctatggagatgacatggatgccacctaccgccccatgtactccagcgatgtgccccttgacccgctggagatgcacatggacatggatggagactaccccatcgacacctacagcgacggcctcaggcccccgtaccccactgcagaccacatgctggcctaggcggcctggccccagtgcggttcctcatctgagaggctctccgtgcaggcgatggggcaagacagaaaagtgcctgagctggggaagccggggtgtaacttcctgctgcaccctgcgcctccagaggtcctccgtagggtctttcttgggatagtgttctgctcctgcttttctgtcctgggcatgggtccagggcctgacaccccctccccgcccctgtggccctggccactaaagcttcagactcaagtacccattctgttttcccccagcaacgcccctccaaacctccagcctccctgtctccagctgcctgggcccggaagggctttggttccttctctgggtctgattttctcactgaactccaccgaccaactgccctaagcccccagggcctccagggcccaggttcgagacccaaacccccaaaatccaaaacttctcttgaaaagttcagggaccgtccaggggagatggggaggagatatggagtgagtcacctgctccagaagatgccagcttctctctccagggtgcttagttggctttgcccacccctcactccccagggagctccggggacagcttcctcacacccctgtcccacccacacagctgccctagctgaccccgagaagtgctcttggctgacccctctggtgtgtggtgaggggctttctcttccccttcctgtttcagacccccccatttcccgcacatggtgtggggggctgggggaggtccaagcagagtgttttattattatcgctttatgtttttggttattggtttttttgtatagaccaaagcaaagaaaataaaaataacacag

SEQ ID NO: 55 - DNA, 3483 bp, Homo sapiens
  mRNA (1)..(3483): gi|23510339|ref|NM_153280.1| Homo sapiens ubiquitin-activating enzyme E1 (A1S9T and BN75 temperature sensitivity complementing) (UBE1), transcript variant 2
cttgtacgacagaggtggtttgctcttccgttgccccgtggcttcagctcatctttggcaggaaggcgaggcttccgcccggcacaggggatgtccagctcgccgctgtccaagaaacgtcgcgtgtccgggcctgatccaaagccgggttctaactgctcccctgcccagtccgtgttgtccgaagtgccctcggtgccaaccaacggaatggccaagaacggcagtgaagcagacatagacgagggcctttactcccggcagctgtatgtgttgggccatgaggcaatgaagcggctccagacatccagtgtcctggtatcaggcctgcggggcctgggcgtggagatcgctaagaacatcatccttggtggggtcaaggctgttaccctacatgaccagggcactgcccagtgggctgatctttcctcccagttctacctgcgggaggaggacatcggtaaaaaccgggccgaggtatcacagccccgcctcgctgagctcaacagctatgtgcctgtcactgcctacactggacccctcgttgaggacttccttagtggtttccaggtggtggtgctcaccaacacccccctggaggaccagctgcgagtgggtgagttctgtcacaaccgtggcatcaagctggtggtggcagacacgcggggcctgtttgggcagctcttctgtgactttggagaggaaatgatcctcacagattccaatggggagcagccactcagtgctatggtttctatggttaccaaggacaaccccggtgtggttacctgcctggatgaggcccgacacgggtttgagagcggggactttgtctccttttcagaagtacagggcatggttgaactcaacggaaatcagcccatggagatcaaagtcctgggtccttatacctttagcatctgtgacacctccaacttctccgactacatccgtggaggcatcgtcagtcaggtcaaagtacctaagaagattagctttaaatccttggtggcctcactggcagaacctgactttgtggtgacggacttcgccaagttttctcgccctgcccagctgcacattggcttccaggccctgcaccagttctgtgctcagcatggccggccacctcggccccgcaatgaggaggatgcagcagaactggtagccttagcacaggctgtgaatgctcgagccctgccagcagtgcagcaaaataacctggacgaggacctcatccggaagctggcatatgtggctgctggggatctggcacccataaacgccttcattgggggcctggctgcccaggaagtcatgaaggcctgctccgggaagttcatgcccatcatgcagtggctatactttgatgcccttgagtgtctccctgaggacaaagaggtcctcacagaggacaagtgcctccagcgccagaaccgttatgacgggcaagtggctgtgtttggctcagacctgcaagagaagctgggcaagcagaagtatttcctggtgggtgcgggggccattggctgtgagctgctcaagaactttgccatgattgggctgggctgcggggagggtggagaaatcatcgttacagacatggacaccattgagaagtcaaatctgaatcgacagtttcttttccggccctgggatgtcacgaagttaaagtctgacacggctgctgcagctgtgcgccaaatgaatccacatatccgggtgacaagccaccagaaccgtgtgggtcctgacacggagcgcatctatgatgacgattttttccaaaacctagatggcgtggccaatgccctggacaacgtggatgcccgcatgtacatggaccgccgctgtgtctactaccggaagccactgctggagtcaggcacactgggcaccaaaggcaatgtgcaggtggtgatccccttcctgacagagtcgtacagttccagccaggacccacctgagaagtccatccccatctgtaccctgaagaacttccctaatgccatcgagcacaccctgcagtgggctcgggatgagtttgaaggcctcttcaagcagccagcagaaaatgtcaaccagtacctcacagaccccaagtttgtggagcgaacactgcggctggcaggcactcagcccttggaggtgctggaggctgtgcagcgcagcctggtgctgcagcgaccacagacctgggctgactgcgtgacctgggcctgccaccactggcacacccagtactcgaacaacatccggcagctgctgcacaacttccctcctgaccagctcacaagctcaggagcgccgttctggtctgggcccaaacgctgtccacacccgctcacctttgatgtcaacaatcccctgcatctggactatgtgatggctgctgccaacctgtttgcccagacctacgggctgacaggctctcaggaccgagctgctgtggccacattcctgcagtctgtgcaggtccccgaattcacccccaagtctggcgtcaagatccatgtttctgaccaggagctgcagagcgccaatgcctctgttgatgacagtcgtctagaggagctcaaagccactctgcccagcccagacaagctccctggattcaagatgtaccccattgactttgagaaggatgatgacagcaactttcatatggatttcatcgtggctgcatccaacctccgggcagaaaactatgacattccttctgcagaccggcacaagagcaagctgattgcagggaagatcatcccagccattgccacgaccacagcagccgtggttggccttgtgtgtctggagctgtacaaggttgtgcaggggcaccgacagcttgactcctacaagaatggtttcctcaacttggccctgcctttctttggtttctctgaaccccttgccgcaccacgtcaccagtactataaccaagagtggacattgtgggatcgctttgaggtacaagggctgcagcctaatggtgaggagatgaccctcaaacagttcctcgactattttaagacagagcacaaattagagatcaccatgctgtcccagggcgtgtccatgctctattccttcttcatgccagctgccaagctcaaggaacggttggatcagccgatgacagagattgtgagccgtgtgtcgaagcgaaagctgggccgccacgtgcgggcgctggtgcttgagctgtgctgtaacgacgagagcggcgaggatgtcgaggttccctatgtccgatacaccatccgctgaccccgtctgctcctctaggctggccccttgtccacccctctccacaccccttccagcccagggttcccatttggcttctggcagtggcccaactagccaagtctggtgttccctcatcatccccctacctgaacccctcttgccactgccttctaccttgtttgaaacctgaatcctaataaagaattaataactcccaaaaaaaaaaaaaaaaaa

SEQ ID NO: 56 - DNA, 6750 bp, Homo sapiens
  mRNA (1)..(6750): gi|18375625|ref|NM_080686.1| Homo sapiens HLA-B associated transcript 2 (BAT2), transcript variant 1
ccctaggcccgggtcccggatccccgcgcacccggccaggctctggcacgttttgggggaggtgcctgcaggacccaacatactcaatgagcttccagcgcaatgtccgatcgctcggggccgactgccaagggaaaggatggaaagaagtattcctcgctcaacctgtttgatacgtataagggcaagtccttagagatccagaaacccgctgttgcccctcgccatggcctgcagagtctcgggaaagttgccattgcccggcgtatgccacctccagccaaccttccaagcctgaaagccgagaacaaaggcaatgaccccaatgtctcactagtgccaaaagacggaacaggatgggcaagcaaacaggagcagtccgaccccaagagttccgatgcctcaaccgctcagccgccggaatcgcagccactgccggcttcacagacgcctgcctccaaccagccgaaacgacccccagcagcccccgagaacactcctttggttccaagcggggtaaagtcctgggcacaagccagcgtcacccatggagcacatggagatggtggaagggcatcaagcctactgtcacgattctctcgagaggaatttccgaccctgcaggcggctggcgaccaggacaaggctgccaaggaaagggagtctgccgaacagtcgtctgggcccggaccaagcctccgcccccaaaattctacaacttggagggacggaggtgggcgtggccctgatgagctggagggcccggactccaaacttcatcatggtcatgatccccggggtgggctacagccttcaggcccaccccagttccctccctaccgcggaatgatgccgcctttcatgtatcccccatatctcccgttccctccgccctatggaccccaggggccttaccgataccccactcctgatgggcccagccgttttccccgtgtggcgggcccccgaggctcagggccaccaatgcgcttagtagagcctgtgggtcgtccctctattctcaaagaggataatctcaaagagtttgatcagttggatcaggagaatgatgatggttgggcaggggcccatgaagaggttgactacactgaaaagctcaagttcagcgatgaggaagatgggcgagactctgatgaggagggagctgagggccacagggattcccaatcagcttctggtgaggaacggccccctgaagcagatggcaaaaagggcaactcccccaacagcgaaccgcccactcctaagacggcctgggcagaaacctctcggcctccagagacagagccgggacctcctgccccaaagcctcccctacccccacctcaccggggccccgccgggaactggggcccccctggggactacccagatcgtgggggtcctccctgcaagcccccagcacctgaagatgaggatgaggcatggcggcagcgacgaaagcagtcgtcatctgagatttccctggcagtggagcgggcccggcgacggcgagaagaagaggagcggcgcatgcaagaagagcgccgggcagcctgtgctgagaagctcaagcgactcgatgaaaagtttggggcacctgacaagcggctcaaagcagagcctgctgccccacctgctgccccttctaccccagctccaccacctgcagtccctaaagaactccctgcacctccagctccacctccagcatcagccccaacaccagagaaagaacctgaagagccagcacaggcccctcctgcccaatctactcctactccaggtgtggctgcggctcccactctggtgagtggtggtggcagtaccagtagcaccagcagtggcagcttcgaagccagcccagtggaaccacaactgccctcaaaagagggtcctgaaccaccagaagaggttcctcctcctaccacacccccagttccaaaggtggaacccaagggtgatgggattggtcccacccgccagccccctagtcagggcttgggctaccccaaatatcagaagtcgttgcctcctcgtttccagcggcagcagcaggagcagctcctgaagcagcagcagcagcaccagtggcagcagcatcaacagggctctgcccctcctaccccagtgcccccatcaccaccacagcctgtgaccctgggggctgtgccagctccacaggctccacccccgccccccaaggccctgtacccaggtgctctgggccggcccccacccatgcccccaatgaactttgatccccgatggatgatgattcctccttatgtggacccccggctcctccagggtcgtccccctctagacttctaccctcctggtgtgcatccctctggcctagttccccgagagcgttcagacagtgggggctcaagctcagagccatttgaccgtcatgcacctgctatgttacgggaacggggcactccaccggtggatccaaagttggcctgggtaggagatgtcttcaccgccacacccgctgaaccccgcccacttacctcacctctgcgccaggctgcggatgaggatgacaaggggatgaggagcgagactcctccagtacctcccccaccaccctatctggccagttatccaggctttcctgagaatggagcccctgggcccccaatctctcgctttcctctggaggaaccagggccccgtccactcccctggcccccaggcagtgatgaagtggccaagatacaaactccaccacccaagaaggagccccctaaggaggagactgcacagctgacggggccagaagcaggccgaaagcctgcccgcggagtcgggagtggaggccagggccccccaccaccacgcagagagagtcgcacagagacccgctggggccctcgtccagggagcagtcgtcgtggaatccctccagaggagccaggggccccaccccgccgggctgggcctataaagaaacctccaccacctacaaaagtagaagagctgcctcccaagcccctcgaacagggggatgaaacccccaaacccccaaagccagacccactcaagataaccaaggggaagctagggggccccaaggagaccccacccaatggaaatctttcccctgccccaaggcttcggagggactattcgtatgaaagagtgggtcctacctcttgccggggtcggggccgaggcgagtattttgccagagggaggggttttcgggggacctatgggggacgagggcggggagcccgaagccgggaattccgcagttaccgagagtttcgaggagatgatgggcgtggaggtgggacagggggaccaaaccaccctcctgctccccgaggccgcactgccagcgagacacggagcgagggttcagagtatgaggaaatccccaagcggcgccggcagcggggctcagaaacaggcagcgagacccatgagagtgatctggctccttcagacaaggaggctcccacacccaaggagggaacactcacccaggtccctctcgctcccccaccaccaggagccccaccttcaccagccccagcccgcttcactgcccggggtgggcgagtcttcactcccagaggggtgccatctcgccggggccgaggaggagggaggccccctcctcaagtttgcccaggctggagccctccagccaagtctctggctcccaagaaacctcccacaggccctttgccaccaagtaaggagcctttgaaagagaagttgatcccagggcctctgtcccctgtggcgcgcggaggcagcaatggaggtagcaatgtgggcatggaagatggggagcgaccccgaaggaggcgacatgggagggctcagcagcaggataaaccgcctcgtttccggaggctgaagcaggaacgggagaatgccgcaagggggtctgagggcaagccctccctaacccttccagcctccgctcctgcacctgaggaggccctcacaacagtcacagtggccccagcacctcgccgggcagctgccaagtctcctgatctgtcaaaccagaactcagaccaagccaatgaggaatgggagactgcatcagagagcagtgacttcaccagtgagcgccgaggggacaaagaggcacccccaccagtactgctgacacccaaggctgtgggaactcctgggggaggtggaggtggagccgtaccaggtatttcagccatgtcccgcggagatctgagccagagagccaaggatttgagtaaacggagcttctcaagtcagcggccaggcatggaacggcagaatcggcgccctggcccagggggcaaggctggcagcagtggcagcagcagtggaggaggcggtgggggtcctggaggaaggaccgggccaggacgaggcgacaagaggagctggccctctcccaagaaccgaagtcgtcctccagaggagcgtcccccggggcttcccctgcctcccccacctcccagcagttctgctgtcttccgcctggaccaagttatccacagcaaccctgctggcatccaacaggctctggcccagcttagtagccgtcaagggagtgtaactgcaccagggggtcatccaaggcacaagcctgggcctccccaagcccctcagggcccctctcctaggcccccaacccgatacgagccccagagggtcaacagcggcctcagttctgacccccactttgaggagccggggccaatggtgagaggggtgggtgggactcctcgggactctgccggggttagtccctttccccctaaacgtcgggagcggcctcccagaaaaccagagctgctacaggaggaatctttgccacctcctcatagctctggattcttgggctctaagcctgagggcccaggccctcaggcagagtccagagatacaggcacagaggccctgacccctcacatctggaaccgtttacatactgccactagccgaaagagttaccggcccagctccatggagccttggatggagcccctgagtccttttgaggatgtggctggcacagaaatgagtcagtctgacagtggggtggacctgagtggggattctcaggtgtcatcaggtccctgcagccagcgaagttcccctgatggaggactcaagggggcagcagagggaccccccaagaggcctggaggctcctcacccctgaatgctgttccttgtgagggtccacctggctctgaacctcctaggagaccaccacctgccccccacgatggggacagaaaggagctgccccgggagcagcctctgccccctggccccattggcacagaacgatcacagcatacagaccgaggcacagagcctggccccattcggccatcccatcgacctggtcccccagtccagtttggcactagtgacaaggactcagacttacgcctagtggtaggagacagcttgaaagcagagaaggagctaacagcatcagtcactgaggccattcctgtatcacgagactgggagctgcttcccagtgctgctgcctctgctgagccacaatccaagaacctggattctgggcactgtgtcccggagcccagctcctcaggccagcgcctgtatcctgaggttttctatggcagtgctgggccttccagttctcagatctctgggggagccatggactctcaattacatccaaacagtggaggcttccgccctgggacaccctcactgcacccttacagatcacagcccctatacctaccccccggcccagcccctccctcagcactgctctctggggtagctctcaagggccagtttctggatttctccacaatgcaagctacagagctggggaagttgccggctggaggagttctctaccctccaccttccttcctctactctccggctttctgccccagtcctttgcctgacacatcgttgcttcaggtacgccaggatctgccatccccttcggatttttattctactcctctgcagcctggtggccaaagtggctttctcccttcaggggctcctgcccagcagatgcttctacccatggtagactcacagctgcctgtggtgaactttggctccctgccgccagcaccacctcctgccccacctcccctttctctgttacctgtgggccctgctctgcagccccccagcctggctgtgcggcccccacctgctcctgctactcgggtgctgccttcacctgccaggcccttccccgctagcttggggcgagcagagctgcatccagtggaactaaagccgttccaggattatcaaaaactgagcagcaaccttgggggacctggatcatcacggactcccccaactggaaggtccttctctggcctcaattcccgtctcaaggccacgccttccacctacagtggagtcttccgcacccagcgcgtcgacctttaccagcaggcctccccaccagatgccctgcgctggatacctaagccttgggagcggacagggctgccacctcgagaagggccctcccgacgggcagaggagcctgggtcccgaggggacaaggagcctgggttgcccccaccccgctgagggagttcctcttgccccctacccccggggcttgtatatagattataaatatataagggggaaaggggtgggcggggaggggttgtggggctggggcctcacttcccctcctcccccttcccctggtcccctgtccctggggctgtttgttaaaaaagagtaataaaaggattt

SEQ ID NO: 57 - DNA, 2812 bp, Homo sapiens
  mRNA (1)..(2812): gi|39725712|ref|NM_000289.3| Homo sapiens phosphofructokinase, muscle (PFKM)
ctaaaagagtggatcatgacccatgaagagcaccatgcagccaaaaccctggggattggcaaagccattgctgtcttaacctctggtggagatgcccaaggtatgaatgctgctgtcagggctgtggttcgagttggtatcttcaccggtgcccgtgtcttctttgtccatgagggttatcaaggcctggtggatggtggagatcacatcaaggaagccacctgggagagcgtttcgatgatgcttcagctgggaggcacggtgattggaagtgcccggtgcaaggactttcgggaacgagaaggacgactccgagctgcctacaacctggtgaagcgtgggatcaccaatctctgtgtcattgggggtgatggcagcctcactggggctgacaccttccgttctgagtggagtgacttgttgagtgacctccagaaagcaggtaagatcacagatgaggaggctacgaagtccagctacctgaacattgtgggcctggttgggtcaattgacaatgacttctgtggcaccgatatgaccattggcactgactctgccctgcatcggatcatggaaattgtagatgccatcactaccactgcccagagccaccagaggacatttgtgttagaagtaatgggccgccactgtggatacctggcccttgtcacctctctgtcctgtggggccgactgggtttttattcctgaatgtccaccagatgacgactgggaggaacacctttgtcgccgactcagcgagacaaggacccgtggttctcgtctcaacatcatcattgtggctgagggtgcaattgacaagaatggaaaaccaatcacctcagaagacatcaagaatctggtggttaagcgtctgggatatgacacccgggttactgtcttggggcatgtgcagaggggtgggacgccatcagcctttgacagaattctgggcagcaggatgggtgtggaagcagtgatggcacttttggaggggaccccagataccccagcctgtgtagtgagcctctctggtaaccaggctgtgcgcctgcccctcatggaatgtgtccaggtgaccaaagatgtgaccaaggccatggatgagaagaaatttgacgaagccctgaagctgagaggccggagcttcatgaacaactgggaggtgtacaagcttctagctcatgtcagacccccggtatctaagagtggttcgcacacagtggctgtgatgaacgtgggggctccggctgcaggcatgaatgctgctgttcgctccactgtgaggattggccttatccagggcaaccgagtgctcgttgtccatgatggtttcgagggcctggccaaggggcagatagaggaagctggctggagctatgttgggggctggactggccaaggtggctctaaacttgggactaaaaggactctacccaagaagagctttgaacagatcagtgccaatataactaagtttaacattcagggccttgtcatcattgggggctttgaggcttacacagggggcctggaactgatggagggcaggaagcagtttgatgagctctgcatcccatttgtggtcattcctgctacagtctccaacaatgtccctggctcagacttcagcgttggggctgacacagcactcaatactatctgcacaacctgtgaccgcatcaagcagtcagcagctggcaccaagcgtcgggtgtttatcattgagactatgggtggctactgtggctacctggctaccatggctggactggcagctggggccgatgctgcctacatttttgaggagcccttcaccattcgagacctgcaggcaaatgttgaacatctggtgcaaaagatgaaaacaactgtgaaaaggggcttggtgttaaggaatgaaaagtgcaatgagaactataccactgacttcattttcaacctgtactctgaggaggggaagggcatcttcgacagcaggaagaatgtgcttggtcacatgcagcagggtgggagcccaaccccatttgataggaattttgccactaagatgggcgccaaggctatgaactggatgtctgggaaaatcaaagagagttaccgtaatgggcggatctttgccaatactccagattcgggctgtgttctggggatgcgtaagagggctctggtcttccaaccagtggctgagctgaaggaccagacagattttgagcatcgaatccccaaggaacagtggtggctgaaactgaggcccatcctcaaaatcctagccaagtacgagattgacttggacacttcagaccatgcccacctggagcacatcacccggaagcggtccggggaagctgccgtctaaacctctctggagtgaggggaatagattacctgatcatggtcagctcacaccctaataagtccacatcttctcagtgttttagctgtttttttcattaggtttccttttattctgtaccttgcagccatgaccagttctggccaggagctggaggagcaggcagtgggtgggagctccttttaggtagaatttaacatgacttctgccccagctttatctgtcacacaaggctgggcacctctagtgctactgctagatatcacttactcagttagaattttcctaaaaataagctttatttatttctttgtgataacaaagagtcttggttcctctactacttttactacagtgacaaattgtaactacactaataaatgccaactggtcactgtgaaaaaaaaaaaaaaaaaaaaaaaaaaaaaaaaaaaaaaaaaaaaaaaaaaaaaaaaaa

SEQ ID NO: 58 - DNA, 2457 bp, Homo sapiens
  mRNA (1)..(2457): gi|53759143|ref|NM_003875.2| Homo sapiens guanine monphosphate synthetase (GMPS)
gagggccggccggtttggcggcggctgcggagggtatctgaggctcggctgccaagccgaacgggctctggctcctcccagtggccggccggggcggaagcaggaggcgggggcagcgtgcgcgctgctggtcttctctcccgcggcgctggggcccgcgctccgctgctgttgctccattcggcgcttttctggcggctggctcctctccgctgccggctgctcctcgaccaggcctccttctcaacctcagcccgcggcgccgacccttccggcaccctcccgccccgtctcgtactgtcgccgtcaccgccgcggctccggccctggccccgatggctctgtgcaacggagactccaagctggagaatgctggaggagaccttaaggatggccaccaccactatgaaggagctgttgtcattctggatgctggtgctcagtacgggaaagtcatagaccgaagagtgagggaactgttcgtgcagtctgaaattttccccttggaaacaccagcatttgctataaaggaacaaggattccgtgctattatcatctctggaggacctaattctgtgtatgctgaagatgctccctggtttgatccagcaatattcactattggcaagcctgttcttggaatttgctatggtatgcagatgatgaataaggtatttggaggtactgtgcacaaaaaaagtgtcagagaagatggagttttcaacattagtgtggataatacatgttcattattcaggggccttcagaaggaagaagttgttttgcttacacatggagatagtgtagacaaagtagctgatggattcaaggttgtggcacgttctggaaacatagtagcaggcatagcaaatgaatctaaaaagttatatggagcacagttccaccctgaagttggccttacagaaaatggaaaagtaatactgaagaatttcctttatgatatagctggatgcagtggaaccttcaccgtgcagaacagagaacttgagtgtattcgagagatcaaagagagagtaggcacgtcaaaagttttggttttactcagtggtggagtagactcaacagtttgtacagctttgctaaatcgtgctttgaaccaagaacaagtcattgctgtgcacattgataatggctttatgagaaaacgagaaagccagtctgttgaagaggccctcaaaaagcttggaattcaggtcaaagtgataaatgctgctcattctttctacaatggaacaacaaccctaccaatatcagatgaagatagaaccccacggaaaagaattagcaaaacgttaaatatgaccacaagtcctgaagagaaaagaaaaatcattggggatacttttgttaagattgccaatgaagtaattggagaaatgaacttgaaaccagaggaggttttccttgcccaaggtactttacggcctgatctaattgaaagtgcatcccttgttgcaagtggcaaagctgaactcatcaaaacccatcacaatgacacagagctcatcagaaagttgagagaggagggaaaagtaatagaacctctgaaagattttcataaagatgaagtgagaattttgggcagagaacttggacttccagaagagttagtttccaggcatccatttccaggtcctggcctggcaatcagagtaatatgtgctgaagaaccttatatttgtaaggactttcctgaaaccaacaatattttgaaaatagtagctgatttttctgcaagtgttaaaaagccacataccctattacagagagtcaaagcctgcacaacagaagaggatcaggagaagctgatgcaaattaccagtctgcattcactgaatgccttcttgctgccaattaaaactgtaggtgtgcagggtgactgtcgttcctacagttacgtgtgtggaatctccagtaaagatgaacctgactgggaatcacttatttttctggctaggcttatacctcgcatgtgtcacaacgttaacagagttgtttatatatttggcccaccagttaaagaacctcctacagatgttactcccactttcttgacaacaggggtgctcagtactttacgccaagctgattttgaggcccataacattctcagggagtctgggtatgctgggaaaatcagccagatgccggtgattttgacaccattacattttgatcgggacccacttcaaaagcagccttcatgccagagatctgtggttattcgaacctttattactagtgacttcatgactggtatacctgcaacacctggcaatgagatccctgtagaggtggtattaaagatggtcactgagattaagaagattcctggtatttctcgaattatgtatgacttaacatcaaagcccccaggaactactgagtgggagtaataaacttcttgttctattaaagtaccgtgtgcagtttaaa

SEQ ID NO: 59 - DNA, 3606 bp, Homo sapiens
  mRNA (1)..(3606): gi|62460636|ref|NM_024658.3| Homo sapiens importin 4 (IPO4)
gaattgaatcaccttggcaacccgcggggcgtgcagcaacgccctttcctccggaagtgggtgtcagaacctccacgtgctgtccctccccctccccttttcggcccagtagcggcggctcagttgctgccatggagtcagccgggctagagcagctcctacgggagctgctgctaccggacaccgagcgcatccgtcgggccacggaacagctccagatcgttcttcgggcccccgccgctttgccggctctctgcgacctgctagcctcggcggccgacccccagatccgccagtttgcggccgtgctgacccgcagacgactgaacacccgctggcgacggctggcggcggagcaacgggagagcctcaagtccctgatcctgacggccctgcagagagaaacagagcactgtgtgagcctcagcctggcccagctctcagccaccatttttcgaaaggaaggcttggaggcctggccacagcttttgcagctgcttcagcacagtacccacagcccccacagcccagagagagagatggggcttttgctgctaagtgtggtggtgacctcccggcccgaggccttccaaccccaccaccgggagcttcttcggcttctgaatgagactcttggtgaggtgggctctcctgggctgctcttctactccctgcgcactctgaccaccatggctccctacctcagcactgaagatgtgcctctcgctcggatgttggtgcccaagctgatcatggccatgcagactctgatccccatagatgaggcaaaggcctgtgaggcccttgaggctttggatgaactgttggagtcagaggtgccggtcatcaccccctacctctctgaagtcctcacattctgcctggaggtagctagaaatgtggccctgggcaatgcgatacgcatacgtattctctgctgcctcactttcttggtcaaagtcaagagcaaggccttactgaagaatcgtctcctgccacccttgctgcacacccttttccccattgtggctgctgagcccccaccaggccagttggatcccgaggaccaggattcagaagaggaagagttggagattgagctgatgggggagactcccaagcatttcgctgtacaagttgtggacatgctggcactacacctgccccccgagaagctctgtccccagctgatgcccatgttggaagaggctttgcggagcgagagcccataccagcgcaaagctggactcctggtgctggccgtgctgtctgacggagctggcgaccacatcaggcagagactgctgcccccactgctgcagattgtgtgcaagggcctggaggacccctcgcaagttgtacgcaatgctgcgctgtttgccctgggccagttctcagaaaacctacagccccatatcagcagctattcaagggaggtaatgccactgctcctcgcctacttgaagtcggtgcctcttggacacacacaccacctagccaaggcctgctatgccctggagaattttgtggagaacctagggcccaaggtgcagccctaccttccggagcttatggaatgcatgctgcagcttctgaggaaccccagcagtccccgggccaaggagctggctgtgagcgccctgggagccattgctacggctgcccaggcctcgctgctgccctacttccctgccatcatggagcacctgcgggaattcctgttaacaggccgtgaggaccttcagcctgtgcagatccagagcctggagacactgggggtgctggcacgagcagtgggggagcccatgaggccgctggctgaggaatgctgccagctgggtctgggcctctgcgaccaggtagacgaccctgacttgcggcgctgcacgtacagcctatttgcagccttatcgggtctgatgggtgagggcctggcgccccacttggaacagatcaccacgctcatgctgctgtcactgcgttccaccgagggcattgtgcctcagtatgacgggagcagctccttccttctgtttgacgatgagagtgatggggaagaagaggaggagctcatggatgaggatgtggaagaagaggatgactcagagatctcagggtacagcgtggagaatgccttcttcgatgagaaggaagacacctgtgctgccgtgggggagatctctgtgaacaccagtgtggccttccttccatacatggaaagtgtctttgaagaagtatttaaactgctggagtgccctcacctgaatgtgcggaaggcagcccatgaggctctgggtcagttttgctgtgcactgcacaaggcctgtcaaagctgcccctcggaacccaacactgctgctttgcaggctgccctggcccgagtcgtgccatcctacatgcaggcagtgaacagggagcgggaacgccaggtggtgatggccgtgctggaggccctgacaggggtgctccgcagctgtgggaccctcacactgaagccccctgggcgcctcgctgagctctgtggcgtgctcaaggctgtgctgcagaggaagacagcctgtcaggatactgacgaggaggaggaagaggaagatgatgatcaggctgaatacgacgccatgttgctggagcacgctggagaggccatccctgccctggcagccgcggctgggggagactcctttgccccattctttgccggtttcctgccattattggtgtgcaagacaaaacagggctgcacagtggcagagaagtcctttgcagtggggaccttggcagagactattcagggcctgggtgctgcctcagcccagtttgtgtctcggctgctccctgtgctgttgagcaccgcccaagaggcagaccccgaggtgcgaagcaatgccatcttcgggatgggcgtgctggcagagcatgggggccaccctgcccaggaacacttccccaagctgctggggctcctttttcccctcctggcgcgggagcgacatgatcgtgtccgtgacaacatctgtggggcacttgcccgcctgttgatggccagtcccaccaggaaaccagagccccaggtgctggctgccctactgcatgccctgccactgaaggaggacttggaggagtgggtcaccattgggcgcctcttcagcttcctgtaccagagcagccctgaccaggttatagatgtggctcccgagcttctgcgtatctgcagcctcattctggctgacaacaagatcccaccagacaccaaggccgcactgttgctgctcctgacgttcctggccaaacagcacaccgacagctttcaagcagctctgggctcactgcctgttgacaaggctcaggagctccaggctgtactgggcctctcctagactgcaggctgcagccagtccagagagaatagagcctgcccaggccttaagaccacctctcagcccagttcagttctgccttaccaaagattctgagactcatacccatttggagccagccccacttgctgccttacagggctgtccctgaggctggatctgttacaaatgagtcatgacatcatactgtaataaaagcagcttgttttctgcttgaacaataaaaaaa

SEQ ID NO: 60 - DNA, 5750 bp, Homo sapiens
  mRNA (1)..(5750): gi|21237801|ref|NM_003074.2| Homo sapiens SWI/SNF related, matrix associated, actin dependent regulator of chromatin, subfamily c, member 1 (SMARCC1)
gctgggcggggccgggaagcggcagtggcggctacgcgcgcgggggtgcgcgcgggaacgaccgggaaacaccgcgagggccggggtgggccaggctgtggggacgacgggctgcgacgatggccgcagcggcgggcggcggcgggccggggacagcggtaggcgccacgggctcggggattgcggcggcagccgcaggcctagctgtttatcgacggaaggatgggggcccggccaccaagttttgggagagcccggagacggtgtcccagctggattcggtgcgggtctggctgggcaagcactacaagaagtatgttcatgcggatgctcctaccaataaaacactggctgggctggtggtgcagcttcttcagttccaggaagatgcctttgggaagcatgtcaccaacccggccttcaccaaactccctgcaaagtgtttcatggatttcaaagctggaggcgccttatgtcacattcttggggctgcttacaagtataaaaatgaacagggatggcggaggtttgacctacagaacccatctcgaatggatcgtaatgtggaaatgtttatgaacattgaaaaaacattggtgcagaacaattgtttgaccagacccaacatctacctcattccagacattgatctgaagttggctaacaaattgaaagatatcatcaaacgacatcagggaacatttacggatgagaagtcaaaagcttcccaccacatttacccatattcttcctcacaagacgatgaagaatggttgagaccggtgatgagaaaagagaagcaagtgttagtgcattggggcttttacccagacagctatgatacttgggtccatagtaatgatgttgatgctgaaattgaagatccaccaattccagaaaaaccatggaaggttcatgtgaaatggattttggacactgatattttcaatgaatggatgaatgaggaggattatgaggtggatgaaaataggaagcctgtgagttttcgtcagcggatttcaaccaagaatgaagagccagtcagaagtccagaaagaagagatagaaaagcatcagctaatgctcgaaagaggaaacattcgccttcgcctccccctccgacaccaacagaatcacggaagaagagtgggaagaaaggccaagctagcctttatgggaagcgcagaagtcagaaagaggaagatgagcaagaagatctaaccaaggatatggaagacccaacacctgtacccaatatagaagaagtagtacttcccaaaaatgtgaacctaaagaaagatagtgaaaatacacctgttaaaggaggaactgtagcggatctagatgagcaggatgaagaaacagtcacagcaggaggaaaggaagatgaagatcctgccaaaggtgatcagagtcgatcagttgaccttggggaagataatgtgacagagcagaccaatcacattattattcctagttatgcatcatggtttgattataactgtattcatgtgattgaacggcgtgctcttcctgagttcttcaatggaaaaaacaaatccaagactccagaaatatacttggcatatcgaaattttatgattgacacgtatcgtctaaacccccaagagtatttaactagcactgcttgtcggaggaacttgactggagatgtgtgtgctgtgatgagggtccatgccgggggagagcagtggggactcgttaattaccaagttgacccggaaagtagacccatggcaatgggacctcctcctactcctcattttaatgtattagctgataccccctctgggcttgtgcctctgcatcttcgatcacctcaggttcctgctgctcaacagatgctaaattttcctgagaaaaacaaggaaaaaccagttgatttgcagaactttggtctccgtactgacatttactccaagaaaacattagcaaagagtaaaggtgctagtgctggaagagaatggactgaacaggagacccttctactcctggaggccctggagatgtacaaggatgattggaacaaagtgtcggaacatgttggaagtcgtactcaggatgaatgcatcctccactttttgagacttcccattgaggacccataccttgagaattcagatgcttcccttgggcctttggcctaccagcctgtccccttcagtcagtcaggaaatccagttatgagtactgttgcttttttggcatctgtggtggaccctcgcgtggcatctgctgcagcaaaagcggctttggaggagttttctcgggtccgggaggaggtaccactggaattggttgaagctcatgtcaagaaagtacaagaagcagcacgagcctctgggaaagtggatcccacctacggtctggagagcagctgcattgcaggcacagggcccgatgagccagagaagcttgaaggagctgaagaggaaaaaatggaagccgaccctgatggtcagcagcctgaaaaggcagaaaataaagtggaaaatgaaacggatgaaggtgataaagcacaagatggagaaaatgaaaaaaatagtgaaaaggaacaggatagtgaagtgagtgaggataccaaatcagaagaaaaggagactgaagagaacaaagaactcactgatacatgtaaagaaagagaaagtgatactgggaagaagaaagtagaacatgaaatttccgaaggaaatgttgccacagccgcagcagctgctcttgcctcagcggctaccaaagccaagcacctggctgcagtggaagaaagaaagatcaagtccctggtagctctcttggttgagacacaaatgaagaaactagagatcaaacttcgacattttgaagagctggaaactatcatggacagagagaaagaagctctagaacaacagaggcagcagttgcttactgaacgccaaaacttccacatggaacagctgaagtatgctgaattacgagcacgacagcaaatggaacagcagcagcatggccagaaccctcaacaggcacaccagcactcaggaggacctggcctggccccacttggagcagcagggcaccctggcatgatgcctcatcaacagccccctccctaccctctgatgcaccaccagatgccaccacctcatccaccccagccaggtcagataccaggcccaggttccatgatgcccgggcagcacatgccaggccgcatgattcccactgttgcagccaacatccacccctctgggagtggccctacccctcctggcatgccaccaatgccaggaaacatcttaggaccccgggtacccctgacagcacctaacggcatgtatccccctccaccacagcagcagccaccgccaccaccacctgcagatggggtccctccgcctcctgctcctggcccgccagcctcagctgctccttagcctggaagatgcagggaacctccacgcccaccaccatgagctggagtggggatgacaagacttgtgttcctcaactttcttgggtttctttcaggatttttcttctcacagctccaagcacgtgtcccgtgcctccccactcctcttaccacccctctctctgacactttttgtgttgggtcctcagccaacactcaaggggaaacctgtagtgacagtgtgccctggtcatccttaaaataacctgcatctcccctgtcctggtgtgggagtaagctgacagtttctctgcaggtcctgtcaactttagcatgctatgtctttaccatttttgctctcttgcagttttttgctttgtcttatgcttctatggataatgctatataatcattatctttttatctttctgttattattgttttaaaggagagcatcctaagttaataggaaccaaaaaataatgatgggcagaagggggggaatagccacaggggacaaaccttaaggcattataagtgaccttatttctgcttttctgagctaagaatggtgctgatggtaaagtttgagacttttgccacacacaaatttgtgaaaattaaacgagatgtggaaggagaacctcagtgattttattccctagtgaggcctctgagggcctccacactgcctggcagaacataccactgaactagtatgtgctagaggagggcacaaacatccgctccttccctaggcctgctggctctggttttctatgcagatgattcattggattgggggtgagtgttttgtttttctgggggcagtgtgagctttgagggttggaatattgggaggcattccttagtttcctcaactagcctggaaagttaggagtctagggtaattaccccccaatgagtctagcctactattcactgctttgtgtgcatttttttctccctctttaaaaaaccctttaaaagaaaaaaaaaagtagatagtgctaaatattttagctcatgaaacttggttaggatggctgggggtacaagtccccaaactacctcttgttacagtagccagggagtggaatttcgtcaaccggtacttttaaggttaggatgggacgggaaaagtgaagcaggatattagctccttataccttctcccttccatttctgagatctcacattccatctatcacagggttttcaaagagatgctgagggtaacaaggaactcacttggcagtcagagcatcatgctttgaggtttggggtgctcaggctgggagggtagaatgccattccagaggacaagccacaaaaatgccttaatttgagctcgtatttacccctgctgataagtgacttgagagttcccggttttttcctcttgtccttccctcccttctgtccttccatgtgtggggaaagggtgtttttggtagagcttggtttccaaagcgcctggctttctcacttcacattctcaagtggcagtttcattatttagaatgcaaggtggacatcttttggatatctttttctatatattttctaaagctttacatatgagagggtatagggaggtgtttataaaacacttgagaacttttttccttaatatcagaaagcaaaaaaataaaaccacaattgagatttgcctttcaaaccctcaggtttgcctctaaccaggtgtccctggtcaccatcagagtactggaatacgggaaccgaggagaccttggtccttttgtttttgttctggactcttgggagtggaaatgagaatgagtttattctcactggagcttagttccaatgcatttggctccagaaagaccccagtgccttttgacaatggccagggttttacctacttcctgccagtctttcccaaaggaaactcattccaaatacttcttttttcccctggagtccgagaaggaaaatggaattctggttcatactgtggtcccttgtaacctcaggtctttaatgtgatcactttcaaatttaaaagatccaggtggaaatatttttactatagtaataattctacaaaatacctgaattcttaacactgttatatttcagtataagtggtggctttttcttttcatgtctttgatctggttttattcctgtaattcagccacctgattttgtgaggggggggaataatatgtggtttttgtacaaacatgtttctcagtgtgttgttattttggaaaaaatgaggggagggagtttggcaagaatggagaaaatgaatgaagaaggcctaatctctctctttttcagtgaataaatggaacaccatttc

SEQ ID NO: 61 - DNA, 2306 bp, Homo sapiens
  mRNA (1)..(2306): gi|27262629|ref|NM_152298.2| Homo sapiens nuclear autoantigenic sperm protein (histone-binding) (NASP), transcript variant 3
aatctgccattttctgtccctgagtgagtctctggcgtcccaaattgcctgtttttctcgcaggctctattccgttcgctggttcgccacctcaggggaacgatggccatggagtccacagccactgccgccgtcgccgcggagctggtttctgccgacaaaattgaagatgttcctgctccttctacatctgcagataaagtggagagtctggatgtggatagtgaagctaagaaactattgggtttaggacagaaacatctggtgatgggggatattccagcagctgtcaatgcattccaggaagcagctagtcttttaggtaagaagtatggagagacagctaatgagtgtggagaagccttctttttctatgggaaatcacttctggagttggcaagaatggagaatggtgtgttgggaaacgccttggaaggtgtgcatgtggaagaggaagaaggagaaaaaacagaagatgaatctctggtagaaaataatgataacatagatgaaactgaaggctcagaagaggatgataaagaaaatgataagaccgaagaaatgccaaatgattcagtccttgaaaacaagtctcttcaagaaaatgaggaggaggagattgggaacctagagcttgcctgggatatgctggatttagcaaagatcatttttaaaaggcaagaaacaaaagaagcacagctttatgctgcccaggcacatcttaaactcggagaagttagtgttgaatctgaaaactatgtgcaagctgtggaggagttccagtcctgccttaacctgcaggaacagtacctggaagcccacgaccgtctccttgcagagacccactaccagctgggcttggcttatgggtacaactctcagtatgatgaggcagtggcacagttcagcaaatctattgaagtcattgagaacagaatggctgtactaaacgagcaggtgaaggaggctgaaggatcgtctgctgaatacaagaaagaaattgaggaactaaaggaactgctacccgaaattagagagaagatagaagatgcaaaggagtctcagcgtagtgggaatgtagctgaactggctctgaaagctactctggtggagagttctacttcaggtttcactcctggtggaggaggctcttcagtctccatgattgccagtagaaagccaacagacggtgcttcctcatcaaattgtgtgactgatatttcccaccttgtcagaaagaagaggaaaccagaggaagagagtccccggaaagatgatgcaaagaaagccaaacaagagccggaggtgaacggaggcagtggggatgctgtccccagtggaaatgaagtttcggaaaacatggaggaggaggctgagaatcaggctgaaagccgggcagcagtggaggggacagtggaggctggagctacagttgaaagcactgcatgttaagagggggcacagccctcctcccaagggaaagtgtttttgtatataatgtattttttcacttttggaggattctttttgtataacttcaataaagattgtaagcaaaggttgaggctttgatggtttttttcttaattattggctgaatctgccttggagcactgctggttttatatattagccaaaggttttgttctggccttctgtactgatctgtgttcctgatcctaattcctatctgtctaacgtggaggtgatcaagtgtggctgtaggcctttgttttccaatggtgctatattctgttttcaaacacttcactgaacccagctgtcttgcaaactttcagtggtgctgtccctggatgggggctacaaaaacaagaattggtgaagatcttgctcttcagtgctgaaaatggatgatggactttggctgtgagccaggcctaggatggttcttgtcctatatccacctagtcttcacctggggctataattctgtcctggaaaaagaactctgaaaacctgggtcaggggaatgattcctaaggaaaacggtctgcatttgagctctggtttgaaagtagccaaggggactgatggtggacactccagatgtggttggaagcatatgtggggaggctggctggttgagttttgttattttctgtatagaaaggttgagatatatcaacacttggaattgttacccatctgcagaattgacttctcaaataaagatgctaaaaatctcaaaaaaaaaaaaaaaaaaaaaaaaaaaaaaaaaaaaaaaaaaaaaaaaaaaaaaaaaaaaaaaaaaaaaaaaaaaaaaaaaaaaaaaaaaaaaaaaaaaa

SEQ ID NO: 62 - DNA, 3198 bp, Homo sapiens
  mRNA (1)..(3198): gi|7669552|ref|NM_007126.2| Homo sapiens valosin-containing protein (VCP)
ctgccactgccacctcgcggatcaggagccagcgttgttcgcccgacgcctcgctgccggtgggaggaagcgagagggaagccgcttgggctcttgtcgccgctgctcgcccaccgcctggaagagccgagccccggccagtcggtcgcttgccaccgctcgtagccgttacccgcgggccgccacagccgccggcgggagaggcgcgcgccatggcttctggagccgattcaaaaggtgatgacctatcaacagccattctcaaacagaagaaccgtcccaatcggttaattgttgatgaagccatcaatgaggacaacagtgtggtgtccttgtcccagcccaagatggatgaattgcagttgttccgaggtgacacagtgttgctgaaaggaaagaagagacgagaagctgtttgcatcgtcctttctgatgatacttgttctgatgagaagattcggatgaatagagttgttcggaataaccttcgtgtacgcctaggggatgtcatcagcatccagccatgccctgatgtgaagtacggcaaacgtatccatgtgctgcccattgatgacacagtggaaggcattactggtaatctcttcgaggtataccttaagccgtacttcctggaagcgtatcgacccatccggaaaggagacatttttcttgtccgtggtgggatgcgtgctgtggagttcaaagtggtggaaacagatcctagcccttattgcattgttgctccagacacagtgatccactgcgaaggggagcctatcaaacgagaggatgaggaagagtccttgaatgaagtagggtatgatgacattggtggctgcaggaagcagctagctcagatcaaagagatggtggaactgcccctgagacatcctgccctctttaaggcaattggtgtgaagcctcctagaggaatcctgctttacggacctcctggaacaggaaagaccctgattgctcgagctgtagcaaatgagactggagccttcttcttcttgatcaatggtcctgagatcatgagcaaattggctggtgagtctgagagcaaccttcgtaaagcctttgaggaggctgagaagaatgctcctgccatcatcttcattgatgagctagatgccatcgctcccaaaagagagaaaactcatggcgaggtggagcggcgcattgtatcacagttgttgaccctcatggatggcctaaagcagagggcacatgtgattgttatggcagcaaccaacagacccaacagcattgacccagctctacggcgatttggtcgctttgacagggaggtagatattggaattcctgatgctacaggacgcttagagattcttcagatccataccaagaacatgaagctggcagatgatgtggacctggaacaggtagccaatgagactcacgggcatgtgggtgctgacttagcagccctgtgctcagaggctgctctgcaagccatccgcaagaagatggatctcattgacctagaggatgagaccattgatgccgaggtcatgaactctctagcagttactatggatgacttccggtgggccttgagccagagtaacccatcagcactgcgggaaaccgtggtagaggtgccacaggtaacctgggaagacatcgggggcctagaggatgtcaaacgtgagctacaggagctggtccagtatcctgtggagcacccagacaaattcctgaagtttggcatgacaccttccaagggagttctgttctatggacctcctggctgtgggaaaactttgttggccaaagccattgctaatgaatgccaggccaacttcatctccatcaagggtcctgagctgctcaccatgtggtttggggagtctgaggccaatgtcagagaaatctttgacaaggcccgccaagctgccccctgtgtgctattctttgatgagctggattcgattgccaaggctcgtggaggtaacattggagatggtggtggggctgctgaccgagtcatcaaccagatcctgacagaaatggatggcatgtccacaaaaaaaaatgtgttcatcattggcgctaccaaccggcctgacatcattgatcctgccatcctcagacctggccgtcttgatcagctcatctacatcccacttcctgatgagaagtcccgtgttgccatcctcaaggctaacctgcgcaagtccccagttgccaaggatgtggacttggagttcctggctaaaatgactaatggcttctctggagctgacctgacagagatttgccagcgtgcttgcaagctggccatccgtgaatccatcgagagtgagattaggcgagaacgagagaggcagacaaacccatcagccatggaggtagaagaggatgatccagtgcctgagatccgtcgagatcactttgaagaagccatgcgctttgcgcgccgttctgtcagtgacaatgacattcggaagtatgagatgtttgcccagacccttcagcagagtcggggctttggcagcttcagattcccttcagggaaccagggtggagctggccccagtcagggcagtggaggcggcacaggtggcagtgtatacacagaagacaatgatgatgacctgtatggctaagtggtggtggccagcgtgcagtgagctggcctgcctggaccttgttccctgggggtggggcgcttgcccaggagagggaccaggggtgcgcccacagcctgctccattctccagtctgaacagttcagctacagtctgactctggacagggggtttctgttgcaaaaatacaaaacaaaagcgataaaataaaagcgattttcatttggtaggcggagagtgaattaccaacagggaattgggccttgggcctatgccatttctgttgtagtttggggcagtgcaggggacctgtgtggggtgtgaaccaaggcactactgccacctgccacagtaaagcatctgcacttgactcaatgctgcccgagccctcccttccccctatccaacctgggtaggtgggtaggggccacagttgctggatgtttatatagagagtaggttgatttattttacatgcttttgagttaatgttggaaaactaatcacaagcagtttctaaaccaaaaaatgacatgttgtaaaaggacaataaacgttgggtcaaaatggaaaaaaaaaaaaa

SEQ ID NO: 63 - DNA, 2153 bp, Homo sapiens
  mRNA (1)..(2153): gi|21327700|ref|NM_139215.1| Homo sapiens TAF15 RNA polymerase II, TATA box binding protein (TBP)-associated factor, 68kDa (TAF15), transcript variant 1
agtacagctccggccgccgcgccgcctggctttcgtattcgttgttctcggcgggctgtggggcctccgcgccgcggccgttagtcatgtcggattctggaagttacggtcagtctgggggtgagcagcaaagttattctacctatggaaatccaggcagccaaggctatggacaagcatcacaaagctattctggctatgggcaaacgactgattcctcttatggacagaactacagcggttactccagttatggacaaagtcagtcaggttattcacagtcctatggtggttatgagaatcaaaagcagagctcatatagccagcaaccatataataaccagggacagcagcaaaacatggaatcatcaggaagccaaggtggaagagcaccttcctatgaccagccagactatggtcaacaagattcatatgaccagcagtcaggctatgatcaacatcaaggctcatatgatgagcagtcaaattatgatcagcagcatgattcctatagtcaaaaccagcagtcctatcattcacaaagggaaaactacagccaccacacacaagatgaccgtcgtgatgtgagtaggtatggagaagataatagaggatatggcgggtcacagggaggaggtagagggcgtgggggatatgacaaggatggaagaggtcctatgacaggatcaagtggtggtgaccgcggtggcttcaaaaattttggtggtcacagggattatggacccagaacagatgctgattcagaatctgataattcagataacaacacaatctttgtgcaaggacttggggagggtgtgtctacagatcaagttggggagttctttaaacaaataggaattatcaagacaaataagaagaccggaaaaccaatgataaatctttatacagacaaggacacaggaaagccaaagggggaggcaacagtgtcatttgatgaccctccttcagctaaggcagccattgactggtttgatggaaaagaattccatggcaacatcattaaagtgtcctttgccactagaagacctgaattcatgagaggaggtggaagtggaggtgggcggcgaggccgtggaggatatagaggtcgtggaggctttcaagggagaggtggagaccccaaaagtggggattgggtttgccctaatccgtcatgcggaaatatgaactttgctcgaaggaattcctgcaatcagtgcaatgagcctagaccagaggactctcgtccctcaggaggagatttccgggggagaggctacggtggagagaggggctacagaggtcgtgggggcagaggtggagaccgaggcggctatggtggagacagaagtgggggtggctatggtggagacagaagcagcggtggtggctacagcggagatagaagtgggggcggctatggtggagacagaagtgggggtggctatggtggggacagaggcggcggctatggtggggacagaggaggcggctatggaggagaccgaggaggtggctatggaggagatcgaggtggctatggaggagaccgaggtggaggctatggtggagaccgaggaggctatggaggagatcgaggaggttacggaggagatcgaggaggttatggaggagatcgaggaggctatggaggagacagaagccgggggggctatggaggagaccgtggtggtggcagtggctacggtggagaccgaagtggaggctatggaggagacaggagtggtggcggctatggaggagaccgaggtgggggctacggaggagaccgaggtggctatggaggcaaaatgggaggaagaaacgactacagaaatgatcagcgcaaccgaccatactgatgactgttttgaatgttcctttgtctctgacatgatccatagtgaaattgccagagttttgcctgctgctttcctcgtggcctcttcttgggtagtgaaattaagtgacatttggatttttatttgggtgggagggctgggacagtttttcttctagaaatgtctgttgagatttccccctttagtttccaaccttctccccaacccttggagctaaatgcgttgtaaaatattgccaaaatgaaaagtgttttgtaatactgcaataaaggctgcttgtttttgtgg

SEQ ID NO: 64 - DNA, 2366 bp, Homo sapiens
  mRNA (1)..(2366): gi|22538425|ref|NM_147200.1| Homo sapiens TRAF3 interacting protein 2 (TRAF3IP2), transcript variant 1
cccggagaaggtggagggagacgagaagccgccgagagccgactaccctccgggcccagtctgtctgtccgtggtggatctaagcctcatctgtatcctcttgtgatggcgtgaaggaaagccatggcagatttccagcctggtgatgctgtacagaacacaggtggcctgcttccatgcctcctcagcttcaagaaactagaatgaaccgaagcattcctgtggaggttgatgaatcagaaccatacccaagtcagttgctgaaaccaatcccagaatattccccggaagaggaatcagaaccacctgctccaaatataaggaacatggcacccaacagcttgtctgcacccacaatgcttcacaattcctccggagacttttctcaagctcactcaaccctgaaacttgcaaatcaccagcggcctgtatcccggcaggtcacctgcctgcgcactcaagttctggaggacagtgaagacagtttctgcaggagacacccaggcctgggcaaagctttcccttctgggtgctctgcagtcagcgagcctgcgtctgagtctgtggttggagccctccctgcagagcatcagttttcatttatggaaaaacgtaatcaatggctggtatctcagctttcagcggcttctcctgacactggccatgactcagacaaatcagaccaaagtttacctaatgcctcagcagactccttgggcggtagccaggagatggtgcaacggccccagcctcacaggaaccgagcaggcctggatctgccaaccatagacacgggatatgattcccagccccaggatgtcctgggcatcaggcagctggaaaggcccctgcccctcacctccgtgtgttacccccaggacctccccagacctctcaggtccagggagttccctcagtttgaacctcagaggtatccagcatgtgcacagatgctgcctcccaatctttccccacatgctccatggaactatcattaccattgtcctggaagtcccgatcaccaggtgccatatggccatgactaccctcgagcagcctaccagcaagtgatccagccggctctgcctgggcagcccctgcctggagccagtgtgagaggcctgcaccctgtgcagaaggttatcctgaattatcccagcccctgggaccaagaagagaggcccgcacagagagactgctcctttccggggcttccaaggcaccaggaccagccacatcaccagccacctaatagagctggtgctcctggggagtccttggagtgccctgcagagctgagaccacaggttccccagcctccgtccccagctgctgtgcctagaccccctagcaaccctccagccagaggaactctaaaaacaagcaatttgccagaagaattgcggaaagtctttatcacttattcgatggacacagctatggaggtggtgaaattcgtgaactttttgttggtaaatggcttccaaactgcaattgacatatttgaggatagaatccgaggcattgatatcattaaatggatggagcgctaccttagggataagaccgtgatgataatcgtagcaatcagccccaaatacaaacaggacgtggaaggcgctgagtcgcagctggacgaggatgagcatggcttacatactaagtacattcatcgaatgatgcagattgagttcataaaacaaggaagcatgaatttcagattcatccctgtgctcttcccaaatgctaagaaggagcatgtgcccacctggcttcagaacactcatgtctacagctggcccaagaataaaaaaaacatcctgctgcggctgctgagagaggaagagtatgtggctcctccacgggggcctctgcccacccttcaggtggttcccttgtgacaccgttcatccccagatcactgaggccaggccatgtttggggccttgttctgacagcattctggctgaggctggtcggtagcactcctggctggtttttttctgttcctccccgagaggccctctggcccccaggaaacctgttgtgcagagctcttccccggagacctccacacaccctggctttgaagtggagtctgtgactgctctgcattctctgcttttaaaaaaaccattgcaggtgccagtgtcccatatgttcctcctgacagtttgatgtgtccattctgggcctctcagtgcttagcaagtagataatgtaagggatgtggcagcaaatggaaatgactacaaacactctcctatcaatcacttcaggctacttttatgagttagccagatgcttgtgtatcctcagaccaaactgattcatgtacaaataataaaatgtttactcttttgtaa

SEQ ID NO: 65 - DNA, 1244 bp, Homo sapiens
  mRNA (1)..(1244): gi|42656309|ref|XM_290345.4| PREDICTED: Homo sapiens similar to eukaryotic translation initiation factor 3, subunit 5 epsilon, 47kDa; eukaryotic translation initiation factor 3, subunit 5 (epsilon, 47kD); eIF3-epsilon (LOC339799)
ttctcgacaagatggccacaccggcggtaccagcaagtgctcctccggccacgccagccccagtcccggcggcggtcccagcctctgccccagcctcagttccagcgccaacgccagcaccggctgcggctccggttcccgctgcggctccagcctcatcctcagaccctgcggcagcatcggctacaactgcggctcctggccagaccccggcctcagcgcaagctccagcgcagaccccagcgcccgctctgcctggtcctgctcttccagggcccttccccggcggccgcgtggtcaggctgcacccagtcattttggcctccattgtggacagctacgagagacgcaacgagggtgctgcccgagttatcgggaccctgttgggaactgtcgacaaacactcagtggaggtcaccaattgcttttcagtgccgcacaatgagtcagaagatgaagtggctgttgacatggaatttgctaagaatatgtatgaactgcataaaaaagtttctccaaatgagctcatcctgggctggtacgctacaggccatgacatcacagagcactctgtgctgatccatgagtactacagccgagaggcccccaaccccatccacctcactgtggacacaagtctccagaacggccgcatgagcatcaaagcctatgtcagcactttaatgggtgtccctgggaggaccatgggagtgatgttcacacctctgacagtgaaatacgcatactatgacactgaacgcatcggagttgagctgatcatgaagacctgctttagccccaacagagtgattggactcttaagtgacttgcagcaagtaggaggggcatcagctcgcatccaggatgccctgagtacagtgttgcaatatgcagaggatgtactgtctggaaaggtgtcagctgacaatactgtgggccgcttcctgatgagcctggttaaccgagtaccgaaaatagttcccgatgactttgagaccatgctcaacagcaacatcaatgaccttttgatggtgacctacctggccaacctcacacagtcacagattgccctcaatgaaaaacttgtaaacctgtgaatggaccccaagcagtacacttgctggtctaggtattaaccccaggactcagaagtgaaggagaaatgggttttttgtggtcttgagtcacactgagatagtcagttgtgtgtgactctaataaacggagcctaccttttgtaaatt

SEQ ID NO: 66 - DNA, 3701 bp, Homo sapiens
  mRNA (1)..(3701): gi|47078252|ref|NM_021873.2| Homo sapiens cell division cycle 25B (CDC25B), transcript variant 3
gcagccagtcgcggaggcggggaggctgcgcggtcagaggcgcctggagcgagcgaatcctggcccaccgcctgcccaaccgcgtgaccttgattgagttaatgaacttcacgcctcagcgtccaggtctgtaaaatggggtgtctaacgcagaccgtacagcccagctgggtttagcaaacttccgggagccagttggagcctctccccatccctagcggtgatcccaggtgacgacatgccgcggggggtcctgcggaggccaccctagggcgttgctgctgcctttgggagtgtggagctccaaaccatgtcgcgagaggcggattttgggaggccgggatcctcgcgccagggggatgtgcgagggtgtgggataaatcttaattcctccggcccacccaaagcctggaaatccagcctccgcgcctcttgccctgcgggccccgccctcagtcccgccctcatctaacccgctaccccattggtggcgtccggcggcgcggctgctgttatttttcgaatatataaggaggtggaagtggcagctgcaactagaggcttccctggctggtgcctgagcccggcgtccctcgccccccgccctccccgcatccctctcctccctcgcgcctggccctgtggctcttcctccctccctccttccccccccccccacccctcgcccgctgcctccctcggcccagccagctgtgccggcgtttgttggctgccctgcgcccggccctccagccagccttctgccggccccgccgcgatggaggtgccccagccggagcccgcgccaggctcggctctcagtccagcaggcgtgtgcggtggcgcccagcgtccgggccacctcccgggcctcctgctgggatctcatggcctcctggggtccccggtgcgggcggccgcttcctcgccggtcaccaccctcacccagaccatgcacgacctcgccgggctcggcagcgaaaccccaaagagtcaggtagggaccctgctcttccgcagccgcagccgcctgacgcacctatccctgtctcgacgggcatccgaatcctccctgtcgtctgaatcctccgaatcttctgatgcaggtctctgcatggattcccccagccctatggacccccacatggcggagcagacgtttgaacaggccatccaggcagccagccggatcattcgaaacgagcagtttgccatcagacgcttccagtctatgccggtgaggctgctgggccacagccccgtgcttcggaacatcaccaactcccaggcgcccgacggccggaggaagagcgaggcgggcagtggagctgccagcagctctggggaagacaaggagaatgatggatttgtcttcaagatgccatggaagcccacacatcccagctccacccatgctctggcagagtgggccagccgcagggaagcctttgcccagagacccagctcggcccccgacctgatgtgtctcagtcctgaccggaagatggaagtggaggagctcagccccctggccctaggtcgcttctctctgacccctgcagagggggatactgaggaagatgatggatttgtggacatcctagagagtgacttaaaggatgatgatgcagttcccccaggcatggagagtctcattagtgccccactggtcaagaccttggaaaaggaagaggaaaaggacctcgtcatgtacagcaagtgccagcggctcttccgctctccgtccatgccctgcagcgtgatccggcccatcctcaagaggctggagcggccccaggacagggacacgcccgtgcagaataagcggaggcggagcgtgacccctcctgaggagcagcaggaggctgaggaacctaaagcccgcgtcctccgctcaaaatcactgtgtcacgatgagatcgagaacctcctggacagtgaccaccgagagctgattggagattactctaaggccttcctcctacagacagtagacggaaagcaccaagacctcaagtacatctcaccagaaacgatggtggccctattgacgggcaagttcagcaacatcgtggataagtttgtgattgtagactgcagatacccctatgaatatgaaggcgggcacatcaagactgcggtgaacttgcccctggaacgcgacgccgagagcttcctactgaagagccccatcgcgccctgtagcctggacaagagagtcatcctcattttccactgtgaattctcatctgagcgtgggccccgcatgtgccgtttcatcagggaacgagaccgtgctgtcaacgactaccccagcctctactaccctgagatgtatatcctgaaaggcggctacaaggagttcttccctcagcacccgaacttctgtgaaccccaggactaccggcccatgaaccacgaggccttcaaggatgagctaaagaccttccgcctcaagactcgcagctgggctggggagcggagccggcgggagctctgtagccggctgcaggaccagtgaggggcctgcgccagtcctgctacctcccttgcctttcgaggcctgaagccagctgccctatgggcctgccgggctgagggcctgctggaggcctcaggtgctgtccatgggaaagatggtgtgggtgtcctgcctgtctgccccagcccagattcccctgtgtcatcccatcattttccatatcctggtgccccccacccctggaagagcccagtctgttgagttagttaagttgggttaataccagcttaaaggcagtattttgtgtcctccaggagcttcttgtttccttgttagggttaacccttcatcttcctgtgtcctgaaacgctcctttgtgtgtgtgtcagctgaggctgggggagagccgtggtccctgaggatgggtcagagctaaactccttcctggcctgagagtcagctctctgccctgtgtacttcccgggccagggctgcccctaatctctgtaggaaccgtggtatgtctgccatgttgcccctttctcttttcccctttcctgtcccaccatacgagcacctccagcctgaacagaagctcttactctttcctatttcagtgttacctgtgtgcttggtctgtttgactttacgcccatctcaggacacttccgtagactgtttaggttcccctgtcaaatatcagttacccactcggtcccagttttgttgccccagaaagggatgttattatccttgggggctcccagggcaagggttaaggcctgaatcatgagcctgctggaagcccagcccctactgctgtgaaccctggggcctgactgctcagaacttgctgctgtcttgttgcggatggatggaaggttggatggatgggtggatggccgtggatggccgtggatgcgcagtgccttgcatacccaaaccaggtgggagcgttttgttgagcatgacagcctgcagcaggaatatatgtgtgcctatttgtgtggacaaaaatatttacacttagggtttggagctattcaagaggaaatgtcacagaagcagctaaaccaaggactgagcaccctctggattctgaatctcaagatgggggcagggctgtgcttgaaggccctgctgagtcatctgttagggccttggttcaataaagcactgagcaagttgagaaaaaaaaaaaaaaaaaaaaaaaaaaaaa

SEQ ID NO: 67 - DNA, 1892 bp, Homo sapiens
  mRNA (1)..(1892): gi|58331183|ref|NM_006429.2| Homo sapiens chaperonin containing TCP1, subunit 7 (eta) (CCT7), transcript variant 1
caagcttctgggtatttctattgcgcgaggcattgtgggttgctgggcggcccggtctcggagaagaggggagagtggcgggccgctgaataagcttccaaaatgatgcccacaccagttatcctattgaaagaggggactgatagctcccaaggcatcccccagcttgtgagtaacatcagtgcctgccaggtgattgctgaggctgtaagaactaccctgggtccccgtggcatggacaagcttattgtagatggcagaggcaaagcaacaatttctaatgatggggccacaattctgaaacttcttgatgttgtccatcctgcagcaaagactttggtagacattgccaaatcccaagatgctgaggtgggtgatggcaccacctcagtgaccttgctggctgcagagtttctgaagcaggtgaaaccctatgtggaggaaggtttacacccccagatcatcattcgagctttccgcacagccacccagctggcagttaacaagatcaaagagattgctgtgaccgtgaagaaggcagataaagtggagcagaggaagctgctggaaaagtgtgccatgaccgctctgagctccaagctgatctcccagcagaaagctttctttgctaagatggtggtggatgcagtgatgatgctcgatgatttgctgcagcttaaaatgattggaatcaagaaggtacagggtggagccctcgaggattctcagctggtagctggtgttgcattcaagaagactttctcttacgctgggtttgaaatgcaacccaaaaagtaccacaatcccaagattgcccttttgaatgtcgagctcgagttgaaagctgagaaagacaatgctgagataagagtccacacagttgaggattatcaggcaattgttgatgctgagtggaacattctctatgacaagttagagaagatccatcattctggagccaaagttgtcttgtccaaactccccattggggatgtggccacccagtactttgctgacagggacatgttctgtgctggccgagtacctgaggaggatctgaagaggacaatgatggcctgtggaggctcaatccagaccagtgtgaatgctctgtcagcagatgtgctgggtcgatgccaggtgtttgaagagacccagattggaggcgagaggtacaatttttttactggctgccccaaggccaagacatgcaccttcattctccgtggcggcgccgagcagtttatggaggagacagagcggtccctgcatgatgccatcatgatcgtcaggagggccatcaagaatgattcagtggtggctggtggcggggccattgagatggaactctccaagtacctgcgggattactcaaggactattccaggaaaacagcagctgttgattggggcatatgccaaggccttggagattatcccacgccagctgtgtgacaatgctggctttgatgccacaaacattctcaacaagctgcgggctcggcatgcccaggggggtacatggtatggagtagacatcaacaacgaggacattgctgacaactttgaagctttcgtgtgggagccagctatggtgcggatcaatgcgctgacagcagcctctgaggctgcgtgcctgatcgtgtctgtagatgaaaccatcaagaacccccgctcgactgtggatgctcccacagcagcaggccggggccgtggtcgtggccgcccccactgagaggcaccccacccatcacatggctggctggctgctgggtgcacttaccctccttggcttggttacttcattttacaaggaaggggtagtaattggcccactctcttcttactggaggctatttaaataaaatgtaagacttcagataactttgtaaa

SEQ ID NO: 68 - DNA, 4190 bp, Homo sapiens
  mRNA (1)..(4190): gi|14149679|ref|NM_015292.1| Homo sapiens family with sequence similarity 62 (C2 domain containing), member A (FAM62A)
caacctccagccagtccctgggtcgggcggatcctcccagaggtggcacaatggagcgatctccaggagagggccccagccccagccccatggaccagccctctgctccctccgaccccactgaccagccccccgctgctcacgcaaagccagacccaggttctgggggccaacctgctggccctggcgcggcgggtgaggccctggcggtgctgacttcattcgggaggcggttgctggtgctgatacctgtgtatttggccggggcagtgggactcagcgtgggtttcgtgctcttcggcctcgccctctacctgggctggcgccgggtccgcgacgagaaagaacggagccttcgagcagcgaggcagctactggacgacgaggagcagctcactgcgaaaactctctatatgagtcatcgagagctacctgcctgggtcagcttcccagacgtggaaaaggctgaatggctcaataagattgtggcccaggtctggcccttcctgggccagtatatggagaagcttctggctgaaactgtggctccggctgttaggggatctaacccccatctgcaaacatttacatttacacgagtggaactgggtgaaaagccattgcgcatcattggagtcaaggttcacccaggtcagagaaaagagcagatcctgctggacttgaacatcagctatgtaggtgatgtgcagattgatgtggaagtgaagaaatatttttgcaaagcaggagtcaagggcatgcagctacatggcgttttgcgggtgatactggagccactcattggggaccttcccttcgtgggggctgtgtcaatgttcttcatccgacgcccgaccctagacatcaactggacagggatgaccaacctgctggatatcccaggacttagctcactctctgacaccatgatcatggactccattgctgccttcctcgtgttgcccaaccgattactggtgccccttgtgcctgaccttcaagatgtggctcagttgcgttcccctctgcccaggggcattattcgaattcacctgctggctgctcgagggctgagttccaaggacaaatatgtgaagggcctgattgagggcaagtcagacccatatgcacttgtgcgtttgggtacccagacattctgcagtcgtgtcattgatgaagaactcaacccacagtggggagagacttatgaggtgatggtacacgaggtcccagggcaggagattgaagtggaggtgttcgacaaggatccagataaagatgactttctgggcagaatgaagctggatgtagggaaggtgttacaggctagcgttctggatgattggttccctctacaaggtgggcaaggccaagttcacttgaggctagaatggctgtcacttttgtcagatgcagagaaactggagcaggttctacagtggaattggggagtctcctctcgaccagatcccccgtcagctgccatcttagttgtctacctggatcgggcccaggatcttcctctgaagaaggggaacaaggaacccaaccctatggtacaactgtcaattcaggatgtgactcaggagagcaaggctgtctacagtaccaactgcccagtgtgggaggaagcgttccggttcttcctacaagaccctcaaagccaggagctcgatgtgcaagtgaaggatgattccagggccctgactttaggagcactgacgctgcctctggcccgcctgctgactgccccagaactcatcctggaccagtggttccagctcagcagctctggtccaaactccagactctatatgaaactagtcatgaggatcctgtacttggattcatcagaaatatgcttccccacggtgcctggttgtcctggtgcttgggacgtggacagtgagaatccccagagaggcagcagtgtggatgccccacctcgaccctgtcacacgactcctgatagccagtttgggactgagcatgtgcttcggatccatgtattagaggcccaggacctgattgccaaagaccgtttcttggggggactggtgaagggcaagtcagacccctatgtcaaactaaagttggcaggacgaagcttccggagccatgttgttcgggaagatctcaatccccgctggaatgaggtttttgaggtgatcgtcacatcagttccaggccaagagctagaggttgaagtctttgacaaggacttggacaaggatgattttctgggcaggtgtaaagtgcgtctcaccacagtcttaaacagtggcttccttgatgagtggctgaccctggaggatgtcccatctggccgcctgcacttgcgcctggagcgtctcaccccccgtcccactgctgctgagttagaggaggtgctgcaggtgaatagtttgatccagactcagaagagtgcggagctggctgcggccctgctatccatctatatggagcgggcagaggacctcccgctgcgaaaaggcaccaagcacctcagcccttatgctactctcactgtgggagatagttctcataaaaccaagactatttcgcaaacttcagcccctgtctgggatgagagtgcctcctttctcatcaggaaaccacacactgagagcctagagttgcaggttcggggtgagggcactggcgtgctgggctcattatccctgcccctctcagagctcctcgtggctgaccagctctgcttggaccgctggtttacactcagcagtggtcaggggcaggtgctactgagagcacagctagggatcctggtgtcccagcactcgggagtggaagctcatagccacagctacagccacagctcctcatcgctgagtgaagaaccagagctctcggggggaccccctcacatcacctcctcagccccagagctccggcagcgcctaacacatgttgacagtccccttgaggctccagccgggcctctgggccaggtgaaactgactctgtggtactacagtgaagaacgaaagctggtcagcattgttcatggttgccggtcccttcgacagaatggacgtgatcctcctgatccctatgtgtcactgttgctactgccagacaagaaccgaggcaccaagaggaggacctcacagaagaagaggaccctgagtcctgaatttaatgaacggtttgagtgggaactccccctggatgaggcccagagacgaaagctggatgtctctgtcaagtctaattcctccttcatgtcaagagagcgtgagctgctggggaaggtgcagctggacctagctgagacagacctttcccagggtgtagcccggtggtatgacctgatggacaacaaggacaagggcagctcctaggagctggcgagtcccagcctgactgctctgtcttcctgccttcgtctcgctccatcaccgcctcaatgtgatgagcctaaagctagggtccaagggcagagcctgtgcccttcagccctttcacctaacaggcccatattcgggcctttgcctgaccaaagagaagaaccgtatgttccctttactgcacggcctttatccttctgggcccctggggcggggacctgagctggctgtttcctgctttgcctgcacattgttctcccttcctcccaactcctcagggccttctgtatctgtgcctggccagtggcagcactagcagtggtattagcttatgccaaatacagctttggaaggatctttttttctttaactagatggtcaccttcttccctaccacacatgggtgggaaggtggacaggctaacctctccagctgtgagcctcttagactactgcatgtagcaaatgttcagcagctcaggcccccatgtccagttctgtccccactgtcctcaaccctgtcctgaaaattctactgctttgatggctggggccagtctcttgtcactttggaaactgaggacgcgtggattctactcaagcctccaagtagtggcatatcagtcttggagctcctagctggtgatacggagagggctttggaggacttgggacagcagggccaatttttttgcccaagtgcctaggctgctaactcactgactagaacttaatctggtactttacagttttgcaccaactctgccaagccactggatcttacattaaacatcatactcaaaaaaaaaaaaaaaaaaa

SEQ ID NO: 69 - DNA, 3110 bp, Homo sapiens
  mRNA (1)..(3110): gi|13699867|ref|NM_005956.2| Homo sapiens methylenetetrahydrofolate dehydrogenase (NADP+ dependent) 1, methenyltetrahydrofolate cyclohydrolase, formyltetrahydrofolate synthetase (MTHFD1)
gtggaacctcgatattggtggtgtccatcgtgggcagcggactaataaaggccatggcgccagcagaaatcctgaacgggaaggagatctccgcgcaaataagggcgagactgaaaaatcaagtcactcagttgaaggagcaagtacctggtttcacaccacgcctggcaatattacaggttggcaacagagatgattccaatctttatataaatgtgaagctgaaggctgctgaagagattgggatcaaagccactcacattaagttaccaagaacaaccacagaatctgaggtgatgaagtacattacatctttgaatgaagactctactgtacatgggttcttagtgcagctacctttagattcagagaattccattaacactgaagaagtgatcaatgctattgcacccgagaaggatgtggatggattgactagcatcaatgctgggagacttgctagaggtgacctcaatgactgtttcattccttgtacgcctaagggatgcttggaactcatcaaagagacaggggtgccgattgccggaaggcatgctgtggtggttgggcgcagtaaaatagttggggccccgatgcatgacttgcttctgtggaacaatgccacagtgaccacctgccactccaagactgcccatctggatgaggaggtaaataaaggtgacatcctggtggttgcaactggtcagcctgaaatggttaaaggggagtggatcaaacctggggcaatagtcatcgactgtggaatcaattatgtcccagatgataaaaaaccaaatgggagaaaagttgtgggtgatgtggcatacgacgaggccaaagagagggcgagcttcatcactcctgttcctggcggcgtagggcccatgacagttgcaatgctcatgcagagcacagtagagagtgccaagcgtttcctggagaaatttaagccaggaaagtggatgattcagtataacaaccttaacctcaagacacctgttccaagtgacattgatatatcacgatcttgtaaaccgaagcccattggtaagctggctcgagaaattggtctgctgtctgaagaggtagaattatatggtgaaacaaaggccaaagttctgctgtcagcactagaacgcctgaagcaccggcctgatgggaaatacgtggtggtgactggaataactccaacacccctgggagaagggaaaagcacaactacaatcgggctagtgcaagcccttggtgcccatctctaccagaatgtctttgcgtgtgtgcgacagccttctcagggccccacctttggaataaaaggtggcgctgcaggaggcggctactcccaggtcattcctatggaagagtttaatctccacctcacaggtgacatccatgccatcactgcagctaataacctcgttgctgcggccattgatgctcggatatttcatgaactgacccagacagacaaggctctctttaatcgtttggtgccatcagtaaatggagtgagaaggttctctgacatccaaatccgaaggttaaagagactaggcattgaaaagactgaccctaccacactgacagatgaagagataaacagatttgcaagattggacattgatccagaaaccataacttggcaaagagtgttggataccaatgatagattcctgaggaagatcacgattggacaggctccaacggagaagggtcacacacggacggcccagtttgatatctctgtggccagtgaaattatggctgtcctggctctcaccacttctctagaagacatgagagagagactgggcaaaatggtggtggcatccagtaagaaaggagagcccgtcagtgccgaagatctgggggtgagtggtgcactgacagtgcttatgaaggacgcaatcaagcccaatctcatgcagacactggagggcactccagtgtttgtccatgctggcccgtttgccaacatcgcacatggcaattcctccatcattgcagaccagatcgcactcaagcttgttggcccagaagggtttgtagtgacggaagcaggatttggagcagacattggaatggaaaagttttttaacatcaaatgccggtattccggcctctgcccccacgtggtggtgcttgttgccactgtcagggctctcaagatgcacgggggcggccccacggtcactgctggactgcctcttcccaaggcttacatacaggagaacctggagctggttgaaaaaggcttcagtaacttgaagaaacaaattgaaaatgccagaatgtttggaattccagtagtagtggccgtgaatgcattcaagacggatacagagtctgagctggacctcatcagccgcctttccagagaacatggggcttttgatgccgtgaagtgcactcactgggcagaagggggcaagggtgccttagccctggctcaggccgtccagagagcagcacaagcacccagcagcttccagctcctttatgacctcaagctcccagttgaggataaaatcaggatcattgcacagaagatctatggagcagatgacattgaattacttcccgaagctcaacacaaagctgaagtctacacgaagcagggctttgggaatctccccatctgcatggctaaaacacacttgtctttgtctcacaacccagagcaaaaaggtgtccctacaggcttcattctgcccattcgcgacatccgcgccagcgttggggctggttttctgtaccccttagtaggaacgatgagcacaatgcctggactccccacccggccctgtttttatgatattgatttggaccctgaaacagaacaggtgaatggattattctaaacagatcaccatccatcttcaagaagctactttgaaagtctggccagtgtctattcaggcccactgggagttaggaagtataagtaagccaagagaagtcagcccctgcccagaagatctgaaactaatagtaggagtttccccagaagtcattttcagccttaattctcatcatgtataaattaacataaatcatgcatgtctgtttactttagtgacgttccacagaataaaaggaaacaagtttgc

SEQ ID NO: 70 - DNA, 4360 bp, Homo sapiens
  mRNA (1)..(4360): gi|55750040|ref|NM_001940.3| Homo sapiens atrophin 1 (ATN1), transcript variant 2
cgccccccagaggcgccggagcccggaatcccgctcggagccagccagccgtcccgagctaccagcaggtttcattgaaaacagatcctgcaaaagttccaggtgcccacactggaaacttggagatcctgcttcccagaccacagctgtggggaacttggggtggagcagagaagtttctgtattcagctgcccaggcagaggagaatggggtctccacagcctgaagaatgaagacacgacagaataaagactcgatgtcaatgaggagtggacggaagaaagaggcccctgggccccgggaagaactgagatcgaggggccgggcctcccctggaggggtcagcacgtccagcagtgatggcaaagctgagaagtccaggcagacagccaagaaggcccgagtagaggaagcctccaccccaaaggtcaacaagcagggtcggagtgaggagatctcagagagtgaaagtgaggagaccaatgcaccaaaaaagaccaaaactgagcaggaactccctcggccacagtctccctccgatctggatagcttggacgggcggagccttaatgatgatggcagcagcgaccctagggatatcgaccaggacaaccgaagcacgtcccccagtatctacagccctggaagtgtggagaatgactctgactcatcttctggcctgtcccagggcccagcccgcccctaccacccacctccactctttcctccttcccctcaaccgccagacagcacccctcgacagccagaggctagctttgaaccccatccttctgtgacacccactggatatcatgctcccatggagccccccacatctcgaatgttccaggctcctcctggggcccctccccctcacccacagctctatcctgggggcactggtggagttttgtctggacccccaatgggtcccaaggggggaggggctgcctcatcagtggggggccctaatgggggtaagcagcaccccccacccactactcccatttcagtatcaagctctggggctagtggtgctcccccaacaaagccgcctaccactccagtgggtggtgggaacctaccttctgctccaccaccagccaacttcccccatgtgacaccgaacctgcctcccccacctgccctgagacccctcaacaatgcatcagcctctccccctggcctgggggcccaaccactacctggtcatctgccctctccccacgccatgggacagggtatgggtggacttcctcctggcccagagaagggcccaactctggctccttcaccccactctctgcctcctgcttcctcttctgctccagcgccccccatgaggtttccttattcatcctctagtagtagctctgcagcagcctcctcttccagttcttcctcctcttcctctgcctcccccttcccagcttcccaggcattgcccagctacccccactctttccctcccccaacaagcctctctgtctccaatcagccccccaagtatactcagccttctctcccatcccaggctgtgtggagccagggtcccccaccacctcctccctatggccgcctcttagccaacagcaatgcccatccaggccccttccctccctctactggggcccagtccaccgcccacccaccagtctcaacacatcaccatcaccaccagcaacagcaacagcagcagcagcagcagcagcagcagcagcagcagcagcagcagcatcacggaaactctgggccccctcctcctggagcatttccccacccactggagggcggtagctcccaccacgcacacccttacgccatgtctccctccctggggtctctgaggccctacccaccagggccagcacacctgcccccacctcacagccaggtgtcctacagccaagcaggccccaatggccctccagtctcttcctcttccaactcttcctcttccacttctcaagggtcctacccatgttcacacccctccccttcccagggccctcaaggggcgccctaccctttcccaccggtgcctacggtcaccacctcttcggctaccctttccacggtcattgccaccgtggcttcctcgccagcaggctacaaaacggcctccccacctgggcccccaccgtacggaaagagagccccgtccccgggggcctacaagacagccaccccacccggatacaaacccgggtcgcctccctccttccgaacggggaccccaccgggctatcgaggaacctcgccacctgcaggcccagggaccttcaagccgggctcgcccaccgtgggacctgggcccctgccacctgcggggccctcaggcctgccatcgctgccaccaccacctgcggcccctgcctcagggccgcccctgagcgccacgcagatcaaacaggagccggctgaggagtatgagacccccgagagcccggtgcccccagcccgcagcccctcgccccctcccaaggtggtagatgtacccagccatgccagtcagtctgccaggttcaacaaacacctggatcgcggcttcaactcgtgcgcgcgcagcgacctgtacttcgtgccactggagggctccaagctggccaagaagcgggccgacctggtggagaaggtgcggcgcgaggccgagcagcgcgcgcgcgaagaaaaggagcgcgagcgcgagcgggaacgcgagaaagagcgcgagcgcgagaaggagcgcgagcttgaacgcagcgtgaagttggctcaggagggccgtgctccggtggaatgcccatctctgggcccagtgccccatcgccctccatttgaaccgggcagtgcggtggctacagtgcccccctacctgggtcctgacactccagccttgcgcactctcagtgaatatgcccggcctcatgtcatgtctcctggcaatcgcaaccatccattctacgtgcccctgggggcagtggacccggggctcctgggttacaatgtcccggccctgtacagcagtgatccagctgcccgggagagggaacgggaagcccgtgaacgagacctccgtgaccgcctcaagcctggctttgaggtgaagcctagtgagctggaacccctacatggggtccctgggccgggcttggatccctttccccgacatgggggcctggctctgcagcctggcccacctggcctgcaccctttcccctttcatccgagcctggggcccctggagcgagaacgtctagcgctggcagctgggccagccctgcggcctgacatgtcctatgctgagcggctggcagctgagaggcagcacgcagaaagggtggcggccctgggcaatgacccactggcccggctgcagatgctcaatgtgactccccatcaccaccagcactcccacatccactcgcacctgcacctgcaccagcaagatgctatccatgcagcctctgcctcggtgcaccctctcattgaccccctggcctcagggtctcaccttacccggatcccctacccagctggaactctccctaaccccctgcttcctcaccctctgcacgagaacgaagttcttcgtcaccagctctttgctgccccttaccgggacctgccggcctccctttctgccccgatgtcagcagctcatcagctgcaggccatgcacgcacagtcagctgagctgcagcgcttggcgctggaacagcagcagtggctgcatgcccatcacccgctgcacagtgtgccgctgcctgcccaggaggactactacagtcacctgaagaaggaaagcgacaagccactgtagaacctgcgatcaagagagcaccatggctcctacattggaccttggagcacccccaccctccccccaccgtgcccttggcctgccacccagagccaagagggtgctgctcagttgcagggcctccgcagctggacagagagtgggggagggagggacagacagaaggccaaggcccgatgtggtgtgcagaggtggggaggtggcgaggatggggacagaaagcgcacagaatcttggaccaggtctctcttccttgtcccccctgcttttctcctcccccatgcccaacccctgtggccgccgcccctcccctgccccgttggtgtgattatttcatctgttagatgtggctgttttgcgtagcatcgtgtgccacccctgcccctccccgatccctgtgtgcgcgccccctctgcaatgtatgccccttgccccttccccacactaataatttatatatataaatatctatatgacgctcttaaaaaaacatcccaaccaaaaccaaccaaacaaaaacatcctcacaactccccaggaaaaaaaaaaaaaaaaaa

SEQ ID NO: 71 - DNA, 1634 bp, Homo sapiens
  mRNA (1)..(1634): gi|15431309|ref|NM_000526.3| Homo sapiens keratin 14 (epidermolysis bullosa simplex, Dowling-Meara, Koebner) (KRT14)
acccgagcaccttctcttcactcagccaactgctcgctcgctcacctccctcctctgcaccatgactacctgcagccgccagttcacctcctccagctccatgaagggctcctgcggcatcgggggcggcatcgggggcggctccagccgcatctcctccgtcctggccggagggtcctgccgcgcccccagcacctacgggggcggcctgtctgtctcatcctcccgcttctcctctgggggagcctacgggctggggggcggctatggcggtggcttcagcagcagcagcagcagctttggtagtggctttgggggaggatatggtggtggccttggtgctggcttgggtggtggctttggtggtggctttgctggtggtgatgggcttctggtgggcagtgagaaggtgaccatgcagaacctcaatgaccgcctggcctcctacctggacaaggtgcgtgctctggaggaggccaacgccgacctggaagtgaagatccgtgactggtaccagaggcagcggcctgctgagatcaaagactacagtccctacttcaagaccattgaggacctgaggaacaagattctcacagccacagtggacaatgccaatgtccttctgcagattgacaatgcccgtctggccgcggatgacttccgcaccaagtatgagacagagttgaacctgcgcatgagtgtggaagccgacatcaatggcctgcgcagggtgctggacgaactgaccctggccagagctgacctggagatgcagattgagagcctgaaggaggagctggcctacctgaagaagaaccacgaggaggagatgaatgccctgagaggccaggtgggtggagatgtcaatgtggagatggacgctgcacctggcgtggacctgagccgcattctgaacgagatgcgtgaccagtatgagaagatggcagagaagaaccgcaaggatgccgaggaatggttcttcaccaagacagaggagctgaaccgcgaggtggccaccaacagcgagctggtgcagagcggcaagagcgagatctcggagctccggcgcaccatgcagaacctggagattgagctgcagtcccagctcagcatgaaagcatccctggagaacagcctggaggagaccaaaggtcgctactgcatgcagctggcccagatccaggagatgattggcagcgtggaggagcagctggcccagctccgctgcgagatggagcagcagaaccaggagtacaagatcctgctggacgtgaagacgcggctggagcaggagatcgccacctaccgccgcctgctggagggcgaggacgcccacctctcctcctcccagttctcctctggatcgcagtcatccagagatgtgacctcctccagccgccaaatccgcaccaaggtcatggatgtgcacgatggcaaggtggtgtccacccacgagcaggtccttcgcaccaagaactgaggctgcccagccccgctcaggcctaggaggccccccgtgtggacacagatcccactggaagatcccctctcctgcccaagcacttcacagctggaccctgcttcaccctcaccccctcctggcaatcaatacagcttcattatctgagttgcat

SEQ ID NO: 72 - DNA, 1460 bp, Homo sapiens
  mRNA (1)..(1460): gi|63252912|ref|NM_001747.2| Homo sapiens capping protein (actin filament), gelsolin-like (CAPG)
gacggcctggcatacccactgcccaccccagtgactgctcttctgcttcaggcctgctggcctcccagcactgcctgcccctccctgtcgggggacatcgcctccacaccggctggggaaggagcccaggggtggggctggtgggtggggctggtggttggggcagccagagaagtaagagggaagtgagaagccgggtggggcaggctggaaggaagacgaacctacgaagcagagatctgaagacagcatgtacacagccattccccagagtggctctccattcccaggctcagtgcaggatccaggcctgcatgtgtggcgggtggagaagctgaagccggtgcctgtggcgcaagagaaccagggcgtcttcttctcgggggactcctacctagtgctgcacaatggcccagaagaggtttcccatctgcacctgtggataggccagcagtcatcccgggatgagcagggggcctgtgccgtgctggctgtgcacctcaacacgctgctgggagagcggcctgtgcagcaccgcgaggtgcagggcaatgagtctgacctcttcatgagctacttcccacggggcctcaagtaccaggaaggtggtgtggagtcagcatttcacaagacctccacaggagccccagctgccatcaagaaactctaccaggtgaaggggaagaagaacatccgtgccaccgagcgggcactgaactgggacagcttcaacactggggactgcttcatcctggacctgggccagaacatcttcgcctggtgtggtggaaagtccaacatcctggaacgcaacaaggcgagggacctggccctggccatccgggacagtgagcgacagggcaaggcccaggtggagattgtcactgatggggaggagcctgctgagatgatccaggtcctgggccccaagcctgctctgaaggagggcaaccctgaggaagacctcacagctgacaaggcaaatgcccaggccgcagctctgtataaggtctctgatgccactggacagatgaacctgaccaaggtggctgactccagcccatttgcccttgaactgctgatatctgatgactgctttgtgctggacaacgggctctgtggcaagatctatatctggaaggggcgaaaagcgaatgagaaggagcggcaggcagccctgcaggtggccgagggcttcatctcgcgcatgcagtacgccccgaacactcaggtggagattctgcctcagggccatgagagtcccatcttcaagcaatttttcaaggactggaaatgagggtgggcgtcttcctgccccatgctcccctgccccccaccacctgcctgcttgcttctctggctgcctggtcagtgcagaggtgccccctgcagatgttcaataaaggagacaagtgctttcccagctcttttcctgcaccaccaaaaaaaaaaaaaaaaaa

SEQ ID NO: 73 - DNA, 2538 bp, Homo sapiens
  mRNA (1)..(2538): gi|34147375|ref|NM_024311.2| Homo sapiens hypothetical protein ET (ET)
cccgtctccgtctgaagagtgcttctgccctcatttgcctctccctgtgaccccggccccctcagactccgctgcgtcgtctctcggccccgtccagccgttcctgactgctcttcgccggagtccgcttcccaaccccctttcgccagagcccgagagctccgtcggctctgcgtcctggcggattgtcagtggcttcgccccgaggagagctgactgccctgggctgctgcctccggcagagctgagccaaaatgtccccggaatctaaaaagcttttcaacatcattattttaggagttgcctttatgtttatgttcactgcctttcaaacttgtggaaatgtggcgcaaactgtcatcaggagcttaaataggacagattttcacggcagtggatataccagcatggctattatctatggagtgttctctgcttcaaatttgattacaccgtcagtggttgccattgtaggacctcaactctctatgtttgccagtggtttattttacagcatgtacattgccgttttcatccagcctttcccgtggtccttctacacagcctctgttttcattggaattgctgctgctgtgctttggacagcacaaggaaactgcctgacaatcaattcggatgagcacagcattgggagaaacagtgggattttctgggcacttctgcagtctagcttgttctttggaaatctctacatatattttgcctggcaagggaaaactcagatatcagagagtgaccgaagaacagtgtttattgccctaacggtgattagccttgtggggacagttctattctttctcattcggaaaccagattctgaaaatgtcctaggagaagatgagtcttctgatgaccaggacatggaagtcaacgagtctgcccagaacaatctgacaaaggcagtagatgcttttaaaaagtcttttaagttatgtgtcaccaaggagatgctccttcttagtattacaactgcttatacaggtctggaattaactttcttctctggtgtatatggaacctgtattggtgctacaaataaatttggagcagaagagaaaagccttattggactttctggcattttcatcggcattggagaaattttaggtggaagcctcttcggcctgctgagcaagaacaatcgttttggtagaaatccagttgtgctgttgggcatcctggtgcacttcatagctttttatctaatatttctcaacatgcctggagatgccccgattgctcctgttaaaggaactgacagcagtgcttacatcaaatccagcaaagaagttgccattctctgcagttttctgttgggccttggagacagctgctttaatacccagctgcttagtatcttgggctttctgtattctgaagacagcgccccagcatttgccatcttcaagtttgttcagtctatttgcgcagccgtggcatttttctacagcaactaccttctccttcactggcaactcctggtcatggtgatatttgggttttttggaacaatttctttcttcactgtggaatgggaagctgccgcctttgtagcccgcggctctgactaccgaagtatctgatctggtgtccgtgaggggacacgtatgacctcagaaacacagctggacacagagcttggtggaagaagtcgcctttgatcttcactatatattgggtgatgttcagtatggaaaatcaagggattaagactgttaaatcagccagagttggtgttcaagtttacagatatgagttatttaaagcaagtagaataagggaaagctgttctgtcaactgtaattgttcaaagatgttgtttttcatttcatctatctcaattcttataatcatgttatagaatgtaaatgttttcttctctctcctgctcttgttggaagatcctgccttgatttagaatactaggccatatgtcatataaatattttttctggatatggagtatgttttgctatgtaataatgggaagcatatgtcattccccatatgtgttggagaatgacatttaaataaatagcaaagctgggtgtggtgttgcaccgctatactcccagctgttggggaggctgagacggaaggatcgcttcagcccgggagattgaggctgcggtgagctatgatcgcgccactgcactccaggctgggcaacggagtgagaccctgtcttgaaaataataataggctggtcacggtggctcatgcctgtggtcccagcactttgggaggctgaggtgggtggatcgcctgaggtcgggggtttgagaccggcctggccagcgtggtgaagcctcatctctgctgagaatgcagagatgtgttgggtttggtggtgcatgcctgtgatcctagctgctggggaggctgaggtaggagaattcgcttgagcctgggaggcggaggttgcagtgagccgagatcgtgccattgcactccagcctggatgacaagagtgaaactccatctcaaaaaaaaaaaaaaaaaaaaaaaaaaaaaaaa

SEQ ID NO: 74 - DNA, 4878 bp, Homo sapiens
  mRNA (1)..(4878): gi|40018647|ref|NM_003938.4| Homo sapiens adaptor-related protein complex 3, delta 1 subunit (AP3D1)
gtccgccatttgcaaggggcccggagcgggatcgcggcacctgccgagcgggtcgccgcctctgccgcggtccttggaccccgccgccgccctggcctgggagcttgccccgccgcagcggccggcagcgcggcgctccgcgggcggcaggcacgggccccgggccccctcacggcgcccagccgcgggcctcccgaggcaaaagcccgtgggccgccgcgatggccctcaagatggtgaagggcagcatcgaccgcatgttcgacaagaatctgcaggacttggtccgcggcatccgtaaccacaaggaggacgaggcaaaatacatatctcagtgcattgatgagatcaagcaggagctgaagcaggacaacatagcggtgaaggcgaacgcggtctgcaagctgacgtatttacagatgttgggatacgacatcagctgggccgccttcaacatcatagaagtgatgagtgcctccaagttcaccttcaagcgaattggctacctcgctgcttcccagagctttcacgaaggcaccgacgtcatcatgctgaccaccaatcagatccgtaaggacttgagcagccccagccagtacgacacaggtgttgcactgacgggtctgtcctgcttcgtcaccccagaccttgccagagacctggcaaatgacatcatgacactgatgtcacacaccaagccctacatcaggaagaaggctgtgctgatcatgtacaaggtgttcctgaagtaccccgagtcgctgcgccctgcctttccccggctgaaggagaagctggaggaccccgaccccggggttcagtcggctgccgtcaatgtcatctgcgagctggccagacgcaaccctaagaactacctgtccctggccccgctctttttcaagctgatgacgtcctccaccaacaactgggtcctcatcaagatcatcaagctgttcggtgctcttactcctttggaaccgcggctgggcaagaagctgatcgagcccctcaccaatctcatccacagcacgtctgccatgtctctcctctatgaatgtgtgaacaccgtgattgcagtgctcatctcgctgtcctccggcatgcccaaccacagcgccagcatccagctttgtgttcagaaattaaggatattgatcgaggactccgatcagaacttgaagtacctggggctgctggcaatgtccaagatcctgaagacccaccccaagtccgtgcagtcccacaaggacctcatcctgcagtgcctggacgacaaggacgagtccatccggctgcgggccctggacctgctctatgggatggtgtccaagaagaacctgatggagatcgtgaagaagctgatgacccacgtagacaaggcagagggtaccacctaccgtgacgagctgctcaccaagatcattgacatctgcagccagtccaactaccagtacatcaccaacttcgagtggtacatcagcatcctggtggagctgacccggctggagggcacacggcacggccacctcatcgccgcccaaatgctggacgtggccatccgcgtgaaggccatccgcaagttcgccgtgtcccagatgtctgcgctgcttgacagtgcacacctgctggccagcagcacccagcggaacgggatctgtgaggtgctgtacgctgccgcctggatctgcggggagttctcagagcatctgcaggaaccacaccacactttggaggccatgctgcggcccagagtcaccacgctgccaggccacatccaggccgtgtatgtgcagaacgtggtcaagctctacgcctccatcctgcagcagaaggagcaggccggggaggcagagggcgctcaggccgtcacccagctcatggtggaccggctgccccagtttgtgcagagcgcagacctggaggtgcaggagcgggcgtcctgcatcctgcagctggtcaagcacatccagaagcttcaggccaaggacgtgcctgtggcagaggaggtcagcgctctctttgctggggagctgaacccagtggcccccaaggcccagaagaaggttccagtccccgaaggcctggacctggacgcctggatcaatgagccactctcggacagcgagtcagaggacgagaggcccagggccgtcttccacgaggaggagcagcggcgtcccaagcaccggccgtcggaggcggacgaggaagagctggctcggcgccgagaggcccggaagcaggagcaggccaacaaccccttctacatcaagagctcgccatcgccacagaagcggtaccaggacaccccgggcgtggagcacattcccgtggtgcagattgacctctccgtccccttgaaggttccagggctgcctatgtcagatcagtatgtgaagctggaggaggagcggcggcaccggcagaagctggagaaggacaagaggaggaaaaagaggaaggagaaggagaagaagggcaagcgccgccacagctcgctgcccacggagagcgacgaggacatcgcccctgcccagcaggtggacatcgtcacagaggagatgcctgagaatgctctgcccagcgacgaggatgacaaagaccccaacgacccctacagggctctggatattgacctggataagcccttagccgacagcgagaaactgcctattcagaaacacagaaacaccgagacctcaaaatcccctgagaaggacgttcccatggtagaaaagaagagcaagaaacccaagaagaaagagaaaaaacacaaagagaaagagagagacaaggagaagaagaaggagaaggagaagaagaaatctcccaagcctaagaagaagaagcacaggaaggagaaggaggagcggaccaaaggcaagaagaagtccaagaagcagcctccaggcagcgaggaggcagcgggggagccggtgcagaatggcgcgccagaggaggagcagctcccgcctgagtccagctactccctcctcgctgaaaattcctatgttaaaatgacctgtgacatccggggcagtctgcaggaggacagccaggtcactgtggccatcgtgctggagaacaggagcagcagcatcctcaagggcatggagctcagcgtgctggactcactcaatgccaggatggcccggccgcagggctcctccgtccacgatggcgtccccgtgcctttccagctgcccccaggcgtctccaacgaagcccagtatgtgttcaccatccagagcatcgtcatggcgcagaagctcaaggggaccctgtccttcattgccaagaatgacgagggtgcgacccacgagaagctggacttcaggctgcacttcagctgcagctcctacttgatcaccactccctgctacagtgacgcctttgctaagttgctggagtctggggacttgagcatgagctcaatcaaagtcgatggcattcggatgtccttccagaatcttctggcgaagatctgttttcaccaccatttttccgttgtggagcgagtggactcctgcgcctccatgtacagccgctccatccagggccaccatgtctgcctcctggtgaaaaaggtgagaactctgtctcagtcgacgggaagtgcagtgactccacgctactgagcaacttgttagaagagatgaaggcgacgctggccaagtgttgagagctgcctgcgagccccgcaccaccccgcggagcacgtacccagggaccgcagccctgacgtgtctcgcctctcctcagtcgtgtgtactgtacccaagcctgagtgttaatttaactctatgttgtccgccgtgtagacatccgaggtcatttgttgcgttgaattatctgaccatccttttttactgtgactcttcccattctctttggcaagaagtccccttctcgcccccaaaccagcaagggactcccccacctgggtctgtgccctgccccgcgctgggggccgagtccttgaatgtggcttcaggggctcctgtcctgggccagggcctgatgggcaccacgtgaggggcacttggtggacagggcggggctgacgtggcctcctctggggtcgcctgcttttgacccaaaggtcctgacggttgcgtccgggggaggggaaggaagggccgctgtcgccaaggttttctctcccagaacccacagtgggaaagcggtcttgccaggcgttgtccattgtcagtgtgctcgtgggctggtgactgggtcttgggatcccaggccacgcgccagccaggctgtgggcagggcggggccagggacgccaaagagaggttgcagtcagaaccgtggacggggtgggttgaggcctctctgccacccgtcttcctggtcagcagaagtgcatctcggcttgggtttggggtggtccgcatcccctgcttgccactatgcgcaccaaggtttccccacatccttcccagcacccttaggaaggcccaggcagggcctggaagcagcggacctgggctgttctgtgttgaaggagtgtgcccagtgcccttgggcaggacctgtgagagccacctcacaggcagagcccccaccaggcagggcaaggagactccgctcactccccacggccagcgtgggcacaggactgacccttcttcagagataatgacattttatcttctccttttgatgaaaactgtcactttagcatgtaatccattacagaatcccatgcagtgattccaggatttgaaattgtatgatgtgttacataagaatttatttgctatcgacattcccgtataaagagagagacatatcacgctgctgtcatgattttgtgtcaagatgatccaataaagttgtaaaacaggcatttccaaaaaaaaaaaa

SEQ ID NO: 75 - DNA, 5032 bp, Homo sapiens
  mRNA (1)..(5032): gi|42716278|ref|NM_005336.2| Homo sapiens high density lipoprotein binding protein (vigilin) (HDLBP)
agtgcgacctggccttcttcccctcccccatgcggccggcttccgagtgcgcaagcccagagtcgtccgcgttgtccgcctctgcgcaagcgccgtgctcctcccacggcagttggccatatagaggctgggggtggggggggaggtcaagcgtagcctcttctcctttaccaagatggcggcttgtccctgtttcgccacagttcctaccttatgagctcggttttcttatgcttataagagtggaacagcaaaagctggcaggctgacagaggcggcctcaggacggaccttctggctactgaccgttttgctgtggttttcccggattgtgtgtaggtgtgagatcaaccatgagttccgttgcagttttgacccaagagagttttgctgaacaccgaagtgggctggttccgcaacaaatcaaagttgccactctaaattcagaagaggagagcgaccctccaacctacaaggatgccttccctccacttcctgagaaagctgcttgcctggaaagtgcccaggaacccgctggagcctgggggaacaagatccgacccatcaaggcttctgtcatcactcaggtgttccatgtacccctggaggagagaaaatacaaggatatgaaccagtttggagaaggtgaacaagcaaaaatctgccttgagatcatgcagagaactggtgctcacttggagctgtctttggccaaagaccaaggcctctccatcatggtgtcaggaaagctggatgctgtcatgaaagctcggaaggacattgttgctagactgcagactcaggcctcagcaactgttgccattcccaaagaacaccatcgctttgttattggcaaaaatggagagaaactgcaagacttggagctaaaaactgcaaccaaaatccagatcccacgcccagatgaccccagcaatcagatcaagatcactggcaccaaagagggcatcgagaaagctcgccatgaagtcttactcatctctgccgagcaggacaaacgtgctgtggagaggctagaagtagaaaaggcattccaccccttcatcgctgggccgtataatagactggttggcgagatcatgcaggagacaggcacgcgcatcaacatccccccacccagcgtgaaccggacagagattgtcttcactggagagaaggaacagttggctcaggctgtggctcgcatcaagaagatttatgaggagaagaaaaagaagactacaaccattgcagtggaagtgaagaaatcccaacacaagtatgtcattgggcccaagggcaattcattgcaggagatccttgagagaactggagtttccgttgagatcccaccctcagacagcatctctgagactgtaatacttcgaggcgaacctgaaaagttaggtcaggcgttgactgaagtctatgccaaggccaatagcttcaccgtctcctctgtcgccgccccttcctggcttcaccgtttcatcattggcaagaaagggcagaacctggccaaaatcactcagcagatgccaaaggttcacatcgagttcacagagggcgaagacaagatcaccctggagggccctacagaggatgtcaatgtggcccaggaacagatagaaggcatggtcaaagatttgattaaccggatggactatgtggagatcaacatcgaccacaagttccacaggcacctcattgggaagagcggtgccaacataaacagaatcaaagaccagtacaaggtgtccgtgcgcatccctcctgacagtgagaagagcaatttgatccgcatcgagggggacccacagggcgtgcagcaggccaagcgagagctgctggagcttgcatctcgcatggaaaatgagcgtaccaaggatctaatcattgagcaaagatttcatcgcacaatcattgggcagaagggtgaacggatccgtgaaattcgtgacaaattcccagaggtcatcattaactttccagacccagcacaaaaaagtgacattgtccagctcagaggacctaagaatgaggtggaaaaatgcacaaaatacatgcagaagatggtggcagatctggtggaaaatagctattcaatttctgttccgatcttcaaacagtttcacaagaatatcattgggaaaggaggcgcaaacattaaaaagattcgtgaagaaagcaacaccaaaatcgaccttccagcagagaatagcaattcagagaccattatcatcacaggcaagcgagccaactgcgaagctgcccggagcaggattctgtctattcagaaagacctggccaacatagccgaggtagaggtctccatccctgccaagctgcacaactccctcattggcaccaagggccgtctgatccgctccatcatggaggagtgcggcggggtccacattcactttcccgtggaaggttcaggaagcgacaccgttgttatcaggggcccttcctcggatgtggagaaggccaagaagcagctcctgcatctggcggaggagaagcaaaccaagagtttcactgttgacatccgcgccaagccagaataccacaaattcctcatcggcaaggggggcggcaaaattcgcaaggtgcgcgacagcactggagcacgtgtcatcttccctgcggctgaggacaaggaccaggacctgatcaccatcattggaaaggaggacgccgtccgagaggcacagaaggagctggaggccttgatccaaaacctggataatgtggtggaagactccatgctggtggaccccaagcaccaccgccacttcgtcatccgcagaggccaggtcttgcgggagattgctgaagagtatggcggggtgatggtcagcttcccacgctctggcacacagagcgacaaagtcaccctcaagggcgccaaggactgtgtggaggcagccaagaaacgcattcaggagatcattgaggacctggaagctcaggtgacattagaatgtgctataccccagaaattccatcgatctgtcatgggccccaaaggttccagaatccagcagattactcgggatttcagtgttcaaattaaattcccagacagagaggagaacgcagttcacagtacagagccagttgtccaggagaatggggacgaagctggggaggggagagaggctaaagattgtgaccccggctctccaaggaggtgtgacatcatcatcatctctggccggaaagaaaagtgtgaggctgccaaggaagctctggaggcattggttcctgtcaccattgaagtagaggtgccctttgaccttcaccgttacgttattgggcagaaaggaagtgggatccgcaagatgatggatgagtttgaggtgaacatacatgtcccggcacctgagctgcagtctgacatcatcgccatcacgggcctcgctgcaaatttggaccgggccaaggctggactgctggagcgtgtgaaggagctacaggccgagcaggaggaccgggctttaaggagttttaagctgagtgtcactgtagaccccaaataccatcccaagattatcgggagaaagggggcagtaattacccaaatccggttggagcatgacgtgaacatccagtttcctgataaggacgatgggaaccagccccaggaccaaattaccatcacagggtacgaaaagaacacagaagctgccagggatgctatactgagaattgtgggtgaacttgagcagatggtttctgaggacgtcccgctggaccaccgcgttcacgcccgcatcattggtgcccgcggcaaagccattcgcaaaatcatggacgaattcaaggtggacattcgcttcccacagagcggagccccagaccccaactgcgtcactgtgacggggctcccagagaatgtggaggaagccatcgaccacatcctcaatctggaggaggaatacctagctgacgtggtggacagtgaggcgctgcaggtatacatgaaacccccagcacacgaagaggccaaggcaccttccagaggctttgtggtgcgggacgcaccctggaccgccagcagcagtgagaaggctcctgacatgagcagctctgaggaatttcccagctttggggctcaggtggctcccaagaccctcccttggggccccaaacgataatgatcaaaaagaacagaaccctctccagcctgctgacccaaacccaaccacacaatggtttgtctcaatctgacccagcggctggaccctccgtaaattgttgacgctcttcccccttcccgaggtcccgcagggagcctagcgcctggctgtgtgtgcggccgctcctccaggcctggccgtgcccgctcaggacctgctccactgtttaacactaaaccaaggtcatgagcattcgtgctaagataacagactccagctcctggtccacccggcatgtcagtcagcactctggccttcatcacgagagctccgcagccgtggctaggattccacttcctgtgtcatgacctcaggaaataaacgtccttgactttataaaagccaaacgtttgccctcttcctttcccacctccctcctgccagtttcccttggtccagacagtcctgtttgtggagtgcaatcagcctcctccagctgccagagcgcctcagcacaggtgtcagggtgcaaggaagacctggcaatggacagcaggaggcaggttcctggagctggggggtgacctgagaggcagagggtgacgggttctcaggcagtcctgattttacctgccgtggggtctgaaagcaccaagggtccctgcccctacctccactgccagaccctcagcctgaggtctggtgagtggagcctggaggcaaggtggtaggcaccatctgggtcccctgtggccgtcacagtgtctgctgtgattgagatgcgcacaggttgggggaggtagggccttacgcttgtcctcagtgggggcagtttgccttagatgacagctgggctcttcttcacaccacctgcaggccctccctgcccc

SEQ ID NO: 76 - DNA, 3009 bp, Homo sapiens
  mRNA (1)..(3009): gi|83367073|ref|NM_003751.3| Homo sapiens eukaryotic translation initiation factor 3, subunit 9 eta, 116kDa (EIF3S9), transcript variant 1
tagccgtcgcggcgcgcggtgcggcctgggagagtcggaagcgcggcggccgcggagccctgcgagtaggcagcgttgggcccatgcaggacgcggagaacgtggcggtgcccgaggcggccgaggagcgcgccgagcccggccagcagcagccggccgccgagccgccgccagccgaggggctgctgcggcccgcggggcccggcgctccggaggccgcggggaccgaggcctccagtgaggaggtggggatcgcggaggccgggccggagtccgaggtgaggaccgagccggcggccgaggcagaggcggcctccggcccgtccgagtcgccctcgccgccggccgccgaggagctgcccgggtcgcatgctgagccccctgtcccggcacagggcgaggccccaggagagcaggctcgggacgagcgctccgacagccgggcccaggcggtgtccgaggacgcgggaggaaacgagggcagagcggccgaggccgaaccccgggcgctggagaacggcgacgcggacgagccctccttcagcgaccccgaggacttcgtggacgacgtgagcgaggaagaattactgggagatgtactcaaagatcggccccaggaagcagatggaatcgattcggtgattgtagtggacaatgtccctcaggtgggacccgaccgacttgagaaactcaaaaatgtcatccacaagatcttttccaagtttgggaaaatcacaaatgatttttatcctgaagaggatgggaagacaaaagggtatattttcctggagtacgcgtcccctgcccacgctgtggatgctgtgaagaacgccgacggctacaagcttgacaagcagcacacattccgggtcaacctctttacggattttgacaagtatatgacgatcagtgacgagtgggatattccagagaaacagcctttcaaagacctggggaacttacgttactggcttgaagaggcagaatgcagagatcagtacagtgtgatttttgagagtggagaccgcacttccatattctggaatgacgtaaaagaccctgtctcaattgaagaaagagcgagatggacagagacgtatgtgcgttggtctcctaagggcacctacctggctacctttcatcaaagaggcattgctctatgggggggagagaaattcaagcaaattcagagattcagccaccaaggggttcagcttattgacttctcaccttgtgaaaggtacctggtgacctttagccccctgatggacacgcaggatgaccctcaggccataatcatctgggacatccttacggggcacaagaagaggggttttcactgtgagagctcagcccattggcctatttttaagtggagccatgatggcaaattctttgccagaatgaccctggatacgcttagcatctatgaaactccttctatgggtcttttggacaagaagagtttgaagatctctgggataaaagacttttcttggtctcctggtggtaacataatcgccttctgggtgcctgaagacaaagatattccagccagggtaaccctgatgcagctccctaccaggcaagagatccgagtgaggaacctgttcaatgtggtggactgcaagctccattggcagaagaacggagactacttgtgtgtgaaagtagataggactccgaaaggcacccagggtgttgtcacaaattttgaaattttccgaatgagggagaaacaggtacctgtggatgtggtcgagatgaaagaaaccatcatagcctttgcctgggaaccaaatggaagtaagtttgctgtgctgcacggagaggctccgcggatatctgtgtctttctaccacgtcaaaaacaacgggaagattgaactcatcaagatgttcgacaagcagcaggcgaacaccatcttctggagcccccaaggacagttcgtggtgttggcgggcctgaggagtatgaacggtgccttagcgtttgtggacacttcggactgcacggtcatgaacatcgcagagcactacatggcttccgacgtcgaatgggatcctactgggcgctacgtcgtcacctctgtgtcctggtggagccataaggtggacaacgcgtactggctgtggactttccagggacgcctcctgcagaagaacaacaaggaccgcttctgccagctgctgtggcggccccggcctcccacactcctgagccaggaacagatcaagcaaattaaaaaggatctgaagaaatactctaagatctttgaacagaaggatcgtttgagtcagtccaaagcctcaaaggaattggtggagagaaggcgcaccatgatggaagatttccggaagtaccggaaaatggcccaggagctctatatggagcagaaaaacgagcgcctggagttgcgaggaggggtggacactgacgagctggacagcaacgtggacgactgggaagaggagaccattgagttcttcgtcactgaagaaatcattcccctcgggaatcaggagtgacctggagcactgtgcgcagccgtgtgtgctgtggagccgaggccgtcctgcaggaagccgcgtgactcccgcctcctccctgtgctctctggctctggactgtgactgcgcctggattctgccattgcgacacatttttgtgcctttcagcccctggtgtctgcagtgggggatttaaggcacccgcttccacttctttcttgtttggagttttctgttggaaccgccggcgttggctccgaagacttagcgacgccactggcggcaccttctcctgcgcccagtgatgtttccacggtgcctgtacacagccgagcagcatttccgttgaaggacttgcatccccattgcgggcagtgctggacgtgtcccggagacccaccgggagggcgccgccatgccttgtacccccaccgtgcaggttgtggccggttttctccgcaggttgaacatggaaataaaagcaaacttgtatgaaaaa

SEQ ID NO: 77 - DNA, 2697 bp, Homo sapiens
  mRNA (1)..(2697): gi|5803114|ref|NM_006839.1| Homo sapiens inner membrane protein, mitochondrial (mitofilin) (IMMT)
acgcgggcacgcacacacggaagcacgcctccacttaactcgcgccgccgcggcagctcgagtccaccagcagcgccgtccgcttgaccgagatgctgcgggcctgtcagttatcgggtgtgaccgccgccgcccagagttgtctctgtgggaagtttgtcctccgtccattgcgaccatgccgcagatactctacttcaggcagctctgggttgactactggcaaaattgctggagctggccttttgtttgttggtggaggtattggtggcactatcctatatgccaaatgggattcccatttccgggaaagtgtagagaaaaccataccttactcagacaaactcttcgagatggttcttggtcctgcagcttataatgttccattgccaaagaaatcgattcagtcgggtccactaaaaatctctagtgtatcagaagtaatgaaagaatctaaacagtctgcctcacaactccaaaaacaaaagggagatactccagcttcagcaacagcacctacagaagcggctcaaattatttctgcagcaggtgataccctgtcggtcccagcccctgcagttcagcctgaggaatctttaaaaactgatcaccctgaaattggtgaaggaaaacccacacctgcactttcagaagaagcatcctcatcttctataagggagcgaccacctgaagaagttgcagctcgccttgcacaacaggaaaaacaagaacaagttaaaattgagtctctagccaagagcttagaagatgctctgaggcaaactgcaagtgtcactctgcaggctattgcagctcagaatgctgcggtccaggctgtcaatgcacactccaacatattgaaagccgccatggacaattctgagattgcaggcgagaagaaatctgctcagtggcgcacagtggagggtgcattgaaggaacgcagaaaggcagtagatgaagctgccgatgcccttctcaaagccaaagaagagttagagaagatgaaaagtgtgattgaaaatgcaaagaaaaaagaggttgctggggccaagcctcatataactgctgcagagggtaaacttcacaacatgatagttgatctggataatgtggtcaaaaaggtccaagcagctcagtctgaggctaaggttgtatctcagtatcatgagctggtggtccaagctcgggatgactttaaacgagagctggacagtattactccagaagtccttcctggatggaaaggaatgagtgtttcagacttagctgacaagctctctactgatgatctgaactccctcattgctcatgcacatcgtcgtattgatcagctgaacagagagctggcagaacagaaggccaccgaaaagcagcacatcacgttagccttggagaaacaaaagctggaagaaaagcgggcatttgactctgcagtagcaaaagcattagaacatcacagaagtgaaatacaggctgaacaggacagaaagatagaagaagtcagagatgccatggaaaatgaaatgagaacccagcttcgccgacaggcagctgcccacactgatcacttgcgagatgtccttagggtacaagaacaggaattgaagtctgaatttgagcagaacctgtctgagaaactctctgaacaagaattacaatttcgtcgtctcagtcaagagcaagttgacaactttactctggatataaatactgcctatgccagactcagaggaatcgaacaggctgttcagagccatgcagttgctgaagaggaagccagaaaagcccaccaactctggctttcagtggaggcattaaagtacagcatgaagacctcatctgcagaaacacctactatcccgctgggtagtgcagttgaggccatcaaagccaactgttctgataatgaattcacccaagctttaaccgcagctatccctccagagtccctgacccgtggggtgtacagtgaagagacccttagagcccgtttctatgctgttcaaaaactggcccgaagggtagcaatgattgatgaaaccagaaatagcttgtaccagtacttcctctcctacctacagtccctgctcctattcccacctcagcaactgaagccgcccccagagctctgccctgaggatataaacacatttaaattactgtcatatgcttcctattgcattgagcatggtgatctggagctagcagcaaagtttgtcaatcagctgaagggggaatccagacgagtggcacaggactggctgaaggaagcccgaatgaccctagaaacgaaacagatagtggaaatcctgacagcatatgccagcgccgtaggaataggaaccactcaggtgcagccagagtgaggtttaggaagattttcataaagtcatatttcatgtcaaaggaaatcagcagtgatagatgaagggttcgcagcgagagtcccggacttgtctagaaatgagcaggtttacaagtactgttctaaatgttaacacctgttgcatttatattctttccatttgctatcatgtcagtgaacgccaggagtgctttctttgcaacttgtgtaacattttctgttttttcaggttttactgatgaggcttgtgaggccaatcaaaataatgtttgtgatctctactactgttgattttgccctcggagcaaactgaataaagcaacaagatg

SEQ ID NO: 78 - DNA, 6732 bp, Homo sapiens
  mRNA (1)..(6732): gi|14589948|ref|NM_000937.2| Homo sapiens polymerase (RNA) II (DNA directed) polypeptide A, 220kDa (POLR2A)
gagagcgcggccgggacggttggagaagaaggcggctccccggaagggggagagacaaactgccgtaacctctgccgttcaggaacccggttacttatttattcgttaccctttttcttcttcctcccccaaaaaccttttccttttcccttctttttttttcctttttgggagctgaaaaatttccggtaagggaaagaagggctcctttcgctccttatttcgccgcctccttccctccgccaccttcccctcctccggctttttcctcccaactcggggaggtccttcccggtggccgccctgacgaggtctgagcacctaggcggaggcggcgcaggctttttgtagtgaggtttgcgcctgcgcaggcgcctgcctccgccatgcacgggggtggccccccctcgggggacagcgcatgcccgctgcgcaccatcaagagagtccagttcggagtcctgagtccggatgaactgaagcgaatgtctgtgacggagggtggcatcaaatacccagagacgactgagggaggccgccccaagcttggggggctgatggacccgaggcagggggtgattgagcggactggccgctgccaaacatgtgcaggaaacatgacagagtgtcctggccactttggccacattgaactggccaagcctgtgtttcacgtgggcttcctggtgaagacaatgaaagttttgcgctgtgtctgcttcttctgctccaaactgcttgtggactctaacaacccaaagatcaaggatatcctggctaagtccaagggacagcccaagaagcggctcacacatgtctacgacctttgcaagggcaaaaacatatgcgagggtggggaggagatggacaacaagttcggtgtggaacaacctgagggtgacgaggatctgaccaaagaaaagggccatggtggctgtgggcggtaccagcccaggatccggcgttctggcctagagctgtatgcggaatggaagcacgttaatgaggactctcaggagaagaagatcctgctgagtccagagcgagtgcatgagatcttcaaacgcatctcagatgaggagtgttttgtgctgggcatggagccccgctatgcacggccagagtggatgattgtcacagtgctgcctgtgcccccgctctccgtgcggcctgctgttgtgatgcagggctctgcccgtaaccaggatgacctgactcacaaactggctgacatcgtgaagatcaacaatcagctgcggcgcaatgagcagaacggcgcagcggcccatgtcattgcagaggatgtgaagctcctccagttccatgtggccaccatggtggacaatgagctgcctggcttgccccgtgccatgcagaagtctgggcgtcccctcaagtccctgaagcagcggttgaagggcaaggaaggccgggtgcgagggaacctgatgggcaaaagagtggacttctcggcccgtactgtcatcacccccgaccccaacctctccattgaccaggttggcgtgccccgctccattgctgccaacatgacctttgcggagattgtcacccccttcaacattgacagacttcaagaactagtgcgcagggggaacagtcagtacccaggcgccaagtacatcatccgagacaatggtgatcgcattgacttgcgtttccaccccaagcccagtgaccttcacctgcagaccggctataaggtggaacggcacatgtgtgatggggacattgttatcttcaaccggcagccaactctgcacaaaatgtccatgatggggcatcgggtccgcattctcccatggtctacctttcgcttgaatcttagcgtgacaactccgtacaatgcagactttgacggggatgagatgaacttgcacctgccacagtctctggagacgcgagcagagatccaggagctggccatggttcctcgcatgattgtcaccccccagagcaatcggcctgtcatgggtattgtgcaggacacactcacagcagtgcgcaaattcaccaagagagacgtcttcctggagcggggtgaagtgatgaacctcctgatgttcctgtcgacgtgggatgggaaggtcccacagccggccatcctaaagccccggcccctgtggacaggcaagcaaatcttctccctcatcatacctggtcacatcaattgtatccgtacccacagcacccatcccgatgatgaagacagtggcccttacaagcacatctctcctggggacaccaaggtggtggtggagaatggggagctgatcatgggcatcctgtgtaagaagtctctgggcacgtcagctggctccctggtccacatctcctacctagagatgggtcatgacatcactcgcctcttctactccaacattcagactgtcattaacaactggctcctcatcgagggtcatactattggcattggggactccattgctgattctaagacttaccaggacattcagaacactattaagaaggccaagcaggacgtaatagaggtcatcgagaaggcacacaacaatgagctggagcccaccccagggaacactctgcggcagacgtttgagaatcaggtgaaccgcattcttaacgatgcccgagacaagactggctcctctgctcagaaatccctgtctgaatacaacaacttcaagtctatggtcgtgtccggagctaaaggttccaagattaacatctcccaggtcattgctgtcgttggacagcagaacgtcgagggcaagcggattccatttggcttcaagcaccggactctgcctcacttcatcaaggatgactacgggcctgagagccgtggctttgtggagaactcctacctagccggcctcacacccactgagttctttttccacgccatggggggtcgtgaggggctcattgacacggctgtcaagactgctgagactggatacatccagcggcggctgatcaagtccatggagtcagtgatggtgaagtacgacgcgactgtgcggaactccatcaaccaggtggtgcagctgcgctacggcgaagacggcctggcaggcgagagcgttgagttccagaacctggctacgcttaagccttccaacaaggcttttgagaagaagttccgctttgattataccaatgagagggccctgcggcgcactctgcaggaggacctggtgaaggacgtgctgagcaacgcacacatccagaacgagttggagcgggaatttgagcggatgcgggaggatcgggaggtgctcagggtcatcttcccaactggagacagcaaggtcgtcctcccctgtaacctgctgcggatgatctggaatgctcagaaaatcttccacatcaacccacgccttccctccgacctgcaccccatcaaagtggtggagggagtcaaggaattgagcaagaagctggtgattgtgaatggggatgacccactaagtcgacaggcccaggaaaatgccacgctgctcttcaacatccacctgcggtccacgttgtgttcccgccgcatggcagaggagtttcggctcagtggggaggccttcgactggctgcttggggagattgagtccaagttcaaccaagccattgcgcatcccggggaaatggtgggggctctggctgcgcagtcccttggagaacctgccacccagatgaccttgaataccttccactatgctggtgtgtctgccaagaatgtgacgctgggtgtgccccgacttaaggagctcatcaacatttccaagaagccaaagactccttcgcttactgtcttcctgttgggccagtccgctcgagatgctgagagagccaaggatattctgtgccgtctggagcatacaacgttgaggaaggtgactgccaacacagccatctactatgaccccaacccccagagcacggtggtggcagaggatcaggaatgggtgaatgtctactatgaaatgcctgactttgatgtggcccgaatctccccctggctgttgcgggtggagctggatcggaagcacatgactgaccggaagctcaccatggagcagattgctgaaaagatcaatgctggttttggtgacgacttgaactgcatctttaatgatgacaatgcagagaagctggtgctccgtattcgcatcatgaacagcgatgagaacaagatgcaagaggaggaagaggtggtggacaagatggatgatgatgtcttcctgcgctgcatcgagtccaacatgctgacagatatgaccctgcagggcatcgagcagatcagcaaggtgtacatgcacttgccacagacagacaacaagaagaagatcatcatcacggaggatggggaattcaaggccctgcaggagtggatcctggagacggacggcgtgagcttgatgcgggtgctgagtgagaaggacgtggaccccgtacgcaccacgtccaatgacattgtggagatcttcacggtgctgggcattgaagccgtgcggaaggccctggagcgggagctgtaccacgtcatctcctttgatggctcctatgtcaattaccgacacttggctctcttgtgtgataccatgacctgtcgtggccacttgatggccatcacccgacacggagtcaaccgccaggacacaggaccactcatgaagtgttcctttgaggaaacggtggacgtgcttatggaagcagccgcacacggtgagagtgaccccatgaagggggtctctgagaatatcatgctgggccagctggctccggccggcactggctgctttgacctcctgcttgatgcagagaagtgcaagtatggcatggagatccccaccaatatccccggcctgggggctgctggacccaccggcatgttctttggttcagcacccagtcccatgggtggaatctctcctgccatgacaccttggaaccagggtgcaacccctgcctatggcgcctggtcccccagtgttgggagtggaatgaccccaggggcagccggcttctctcccagtgctgcgtcagatgccagcggcttcagcccaggttactcccctgcctggtctcccacaccgggctccccggggtccccaggtccctcaagcccctacatcccttcaccaggtggtgccatgtctcccagctactcgccaacgtcacctgcctacgagccccgctctcctgggggctacacaccccagagtccctcttattcccccacttcaccctcctactcccctacctctccatcctattctccaaccagtcccaactatagtcccacatcacccagctattcgccaacgtcacccagctactcaccgacctctcccagctactcacccacctctcccagctactcgcccacctctcccagctattcgcccacctctcccagctactcacccacttcccctagctattcgcccacttcccctagctactcgccaacgtctcccagctactcgccgacatctcccagctactcgccaacttcacccagctattctcccacttctcccagctactcacctacctctccaagctattcacccacctcccccagctactcacccacttccccaagttactcacccaccagcccgaactattctccaaccagtcccaattacaccccaacatcacccagctacagcccgacatcacccagctattcccctactagtcccaactacacacctaccagccctaactacagcccaacctctccaagctactctccaacatcacccagctattccccgacctcaccaagttactccccttccagcccacgatacacaccacagtctccaacctataccccaagctcacccagctacagccccagttcgcccagctacagcccaacctcacccaagtacaccccaaccagtccttcttatagtcccagctccccagagtataccccaacctctcccaagtactcacctaccagtcccaaatattcacccacctctcccaagtactcgcctaccagtcccacctattcacccaccaccccaaaatactccccaacatctcctacttattccccaacctctccagtctacaccccaacctctcccaagtactcacctactagccccacttactcgcccacttcccccaagtactcgcccaccagccccacctactcgcccacctcccccaaaggctcaacctactctcccacttcccctggttactcgcccaccagccccacctacagtctcacaagcccggctatcagcccggatgacagtgacgaggagaactgagggcacgtggggtgcggcagcgggctagggcccagggcagcttgcccgtgctgccgtgcagttcttgcctccctcacggggcgtcacccccagcccagctccgttgtacataaataccttgtgacagagctcccggtgaacttctggatcccgtttctgatgcagattcttgtcttgttctccacttgtgctgttagaactcactggcccagtggtgttctacctcctaccccacccaccccctgcctgtccccaaattgaagatccttccttgcctgtggcttgatgcggggcgggtaaagggtattttaacttaggggtagttcctgctgtgagtggttacagctgatcctcgggaagaacaaagctaaagctgccttttgtctgttattttatttttttgaagtttaaataaagtttactaattttgacc

SEQ ID NO: 79 - DNA, 3685 bp, Homo sapiens
  mRNA (1)..(3685): gi|40354199|ref|NM_012112.4| Homo sapiens TPX2, microtubule-associated, homolog (Xenopus laevis) (TPX2)
agtggactcacgcaggcgcaggagactacacttcccaggaactccgggccgcgttgttcgctggtacctccttctgacttccggtattgctgcggtctgtagggccaatcgggagcctggaattgctttcccggcgctctgattggtgcattcgactaggctgcctgggttcaaaatttcaacgatactgaatgagtcccgcggcgggttggctcgcgcttcgttgtcagatctgaggcgaggctaggtgagccgtgggaagaaaagagggagcagctagggcgcgggtctccctcctcccggagtttggaacggctgaagttcaccttccagcccctagcgccgttcgcgccgctaggcctggcttctgaggcggttgcggtgctcggtcgccgcctaggcggggcagggtgcgagcaggggcttcgggccacgcttctcttggcgacaggattttgctgtgaagtccgtccgggaaacggaggaaaaaaagagttgcgggaggctgtcggctaataacggttcttgatacatatttgccagacttcaagatttcagaaaaggggtgaaagagaagattgcaactttgagtcagacctgtaggcctgatagactgattaaaccacagaaggtgacctgctgagaaaagtggtacaaatactgggaaaaacctgctcttctgcgttaagtgggagacaatgtcacaagttaaaagctcttattcctatgatgccccctcggatttcatcaatttttcatccttggatgatgaaggagatactcaaaacatagattcatggtttgaggagaaggccaatttggagaataagttactggggaagaatggaactggagggctttttcagggcaaaactcctttgagaaaggctaatcttcagcaagctattgtcacacctttgaaaccagttgacaacacttactacaaagaggcagaaaaagaaaatcttgtggaacaatccattccgtcaaatgcttgttcttccctggaagttgaggcagccatatcaagaaaaactccagcccagcctcagagaagatctcttaggctttctgctcagaaggatttggaacagaaagaaaagcatcatgtaaaaatgaaagccaagagatgtgccactcctgtaatcatcgatgaaattctaccctctaagaaaatgaaagtttctaacaacaaaaagaagccagaggaagaaggcagtgctcatcaagatactgctgaaaagaatgcatcttccccagagaaagccaagggtagacatactgtgccttgtatgccacctgcaaagcagaagtttctaaaaagtactgaggagcaagagctggagaagagtatgaaaatgcagcaagaggtggtggagatgcggaaaaagaatgaagaattcaagaaacttgctctggctggaatagggcaacctgtgaagaaatcagtgagccaggtcaccaaatcagttgacttccacttccgcacagatgagcgaatcaaacaacatcctaagaaccaggaggaatataaggaagtgaactttacatctgaactacgaaagcatccttcatctcctgcccgagtgactaagggatgtaccattgttaagcctttcaacctgtcccaaggaaagaaaagaacatttgatgaaacagtttctacatatgtgccccttgcacagcaagttgaagacttccataaacgaacccctaacagatatcatttgaggagcaagaaggatgatattaacctgttaccctccaaatcttctgtgaccaagatttgcagagacccacagactcctgtactgcaaaccaaacaccgtgcacgggctgtgacctgcaaaagtacagcagagctggaggctgaggagctcgagaaattgcaacaatacaaattcaaagcacgtgaacttgatcccagaatacttgaaggtgggcccatcttgcccaagaaaccacctgtgaaaccacccaccgagcctattggctttgatttggaaattgagaaaagaatccaggagcgagaatcaaagaagaaaacagaggatgaacactttgaatttcattccagaccttgccctactaagattttggaagatgttgtgggtgttcctgaaaagaaggtacttccaatcaccgtccccaagtcaccagcctttgcattgaagaacagaattcgaatgcccaccaaagaagatgaggaagaggacgaaccggtagtgataaaagctcaacctgtgccacattatggggtgccttttaagccccaaatcccagaggcaagaactgtggaaatatgccctttctcgtttgattctcgagacaaagaacgtcagttacagaaggagaagaaaataaaagaactgcagaaaggggaggtgcccaagttcaaggcacttcccttgcctcattttgacaccattaacctgccagagaagaaggtaaagaatgtgacccagattgaacctttctgcttggagactgacagaagaggtgctctgaaggcacagacttggaagcaccagctggaagaagaactgagacagcagaaagaagcagcttgtttcaaggctcgtccaaacaccgtcatctctcaggagccctttgttcccaagaaagagaagaaatcagttgctgagggcctttctggttctctagttcaggaaccttttcagctggctactgagaagagagccaaagagcggcaggagctggagaagagaatggctgaggtagaagcccagaaagcccagcagttggaggaggccagactacaggaggaagagcagaaaaaagaggagctggccaggctacggagagaactggtgcataaggcaaatccaatacgcaagtaccagggtctggagataaagtcaagtgaccagcctctgactgtgcctgtatctcccaaattctccactcgattccactgctaaactcagctgtgagctgcggataccgcccggcaatgggacctgctcttaacctcaaacctaggaccgtcttgctttgtcattgggcatggagagaacccatttctccagacttttacctacccgtgcctgagaaagcatacttgacaactgtggactccagttttgttgagaattgttttcttacattactaaggctaataatgagatgtaactcatgaatgtctcgattagactccatgtagttacttcctttaaaccatcagccggccttttatatgggtcttcactctgactagaatttagtctctgtgtcagcacagtgtaatctctattgctattgccccttacgactctcaccctctccccactttttttaaaaattttaaccagaaaataaagatagttaaatcctaagatagagattaagtcatggtttaaatgaggaacaatcagtaaatcagattctgtcctcttctctgcataccgtgaatttatagttaaggatccctttgctgtgagggtagaaaacctcaccaactgcaccagtgaggaagaagactgcgtggattcatggggagcctcacagcagccacgcagcaggctctgggtggggctgccgttaaggcacgttctttccttactggtgctgataacaacagggaaccgtgcagtgtgcattttaagacctggcctggaataaatacgttttgtctttccctcaaaaaaaaaaaaaaaaaaaaaaa

SEQ ID NO: 80 - DNA, 2548 bp, Homo sapiens
  mRNA (1)..(2548): gi|23510447|ref|NM_006739.2| Homo sapiens MCM5 minichromosome maintenance deficient 5, cell division cycle 46 (S. cerevisiae) (MCM5)
ttttcccgcgaaactcggcggctgagcgtggaggttcttgtctcccctggtttgtgaagtgcggaaaaccagaggcgcagtcatgtcgggattcgacgatcctggcattttctacagcgacagcttcgggggcgacgcccaggccgacgaggggcaggcccgcaaatcgcagctgcagaggcgcttcaaggagttcctgcggcagtaccgagtgggcaccgaccgcacgggcttcaccttcaaatacagggatgaactcaagcggcattacaacctgggggagtactggattgaggtggagatggaggatctggccagctttgatgaggacctggccgactacttgtacaagcagccagccgagcacctgcagctgctggaggaagctgccaaggaggtagctgatgaggtgacccggccccggccttctggggaggaggtgctccaggacatccaggtcatgctcaagtcggacgccagcccttccagcattcgtagcctgaagtcggacatgatgtcacacctggtgaagatccctggcatcatcatcgcggcctctgcggtccgtgccaaggccacccgcatctctatccagtgccgcagctgccgcaacaccctcaccaacattgccatgcgccctggcctcgagggctatgccctgcccaggaagtgcaacacagatcaggctgggcgccccaaatgcccattggacccgtacttcatcatgcccgacaaatgcaaatgcgtggacttccagaccctgaagctgcaggagctgcctgatgcagtcccccacggggagatgcccagacacatgcagctctactgcgacaggtacctgtgtgacaaggtcgtccctgggaacagggttaccatcatgggcatctactccatcaagaagtttggcctgactaccagcaggggccgtgacagggtgggcgtgggcatccgaagctcctacatccgtgtcctgggcatccaggtggacacagatggctctggccgcagctttgctggggccgtgagcccccaggaggaggaggagttccgtcgcctggctgccctcccaaatgtctatgaggtcatctccaagagcatcgccccctccatctttgggggcacagacatgaagaaggccattgcctgcctgctctttgggggctcccgaaagaggctccctgatggacttactcgccgaggagacatcaacctgctgatgctaggggaccctgggacagccaagtcccagcttctgaagtttgtggagaagtgttctcccattggggtatacacgtctgggaaaggcagcagcgcagctggactgacagcctcggtgatgagggacccttcgtcccggaatttcatcatggagggcggagccatggtcctggccgatggtggggtcgtctgtattgacgagtttgacaagatgcgagaagatgaccgtgtggcaatccacgaagccatggagcagcagaccatctctatcgccaaggctgggatcaccaccaccctgaactcccgctgctccgtcctggctgctgccaactcagtgttcggccgctgggatgagacgaagggggaggacaacattgacttcatgcccaccatcttgtcgcgcttcgacatgatcttcatcgtcaaggatgagcacaatgaggagagggatgtgatgctggccaagcatgtcatcactctgcacgtgagcgcactgacacagacacaggctgtggagggcgagattgacctggccaagctgaagaagtttattgcctactgccgagtgaagtgtggcccccggctgtcagcagaggctgcagagaaactgaagaaccgctacatcatcatgcggagcggggcccgtcagcacgagagggacagtgaccgccgctccagcatccccatcactgtgcggcagctggaggccattgtgcgcatcgcggaagccctcagcaagatgaagctgcagcccttcgccacagaggcagatgtggaggaggccctgcggctcttccaagtgtccacgttggatgctgccttgtccggtaccctgtcaggggtggagggcttcaccagccaggaggaccaggagatgctgagccgcatcgagaagcagctcaagcgccgctttgccattggctcccaggtgtctgagcacagcatcatcaaggacttcaccaagcagaaatacccggagcacgccatccacaaggtgctgcagctcatgctgcggcgcggcgagatccagcatcgcatgcagcgcaaggttctctaccgcctcaagtgagtcgcgccgcctcactggactcatggactcgcccacgcctcgcccctcctgccgctgcctgccattgacaatgttgctgggacctctgcctccccactgcagccctcgaacttcccaggcaccctcctttctgccccagaggaaggagctgtagtgtcctgctgcctctgggcgcccgcctctagcgcggttctgggaagtgtgcttttggcatccgttaataataaagccacggtgtgttcaggtaaaaaaaaaaaaaaa

SEQ ID NO: 81 - DNA, 2821 bp, Homo sapiens
  mRNA (1)..(2821): gi|33469967|ref|NM_005916.3| Homo sapiens MCM7 minichromosome maintenance deficient 7 (S. cerevisiae) (MCM7), transcript variant 1
cgccccttcccagccccaagggtctaggatacagtctttgtagatgagcgggtcccccttggaggacagaatgaagaattgggaaatcatggccgttctggagagtagacaagaagacggcgaaagtcgggcctgccccgccctgcggccccggaacaaaagaacgcgtgtgcgctggccctttaagagcgattctcctccgcccgcgccagctcggaccgcgggaaacccggcgcctgcactaccccgcccggagattcccttccgacgcccgcaccgcctccccgtcactcattctaggcccgcacggtgattggcttgcggctagcgggaggtgaagaaggccgccttgtccgattggcccgcacgcagtggcgccggtcacgtggggggcgacgtttcgcgccaatttcggttggccggccacagtccaccgcgcggagattctcagcttccccaggagcaagacctctgagcccgccaagcgcggccgcacggccctcggcagcgatggcactgaaggactacgcgctagagaaggaaaaggttaagaagttcttacaagagttctaccaggatgatgaactcgggaagaagcagttcaagtatgggaaccagttggttcggctggctcatcgggaacaggtggctctgtatgtggacctggacgacgtagccgaggatgaccccgagttggtggactcaatttgtgagaatgccaggcgctacgcgaagctctttgctgatgccgtacaagagctgctgcctcagtacaaggagagggaagtggtaaataaagatgtcctggacgtttacattgagcatcggctaatgatggagcagcggagtcgggaccctgggatggtccgaagcccccagaaccagtaccctgctgaactcatgcgcagatttgagctgtattttcaaggccctagcagcaacaagcctcgtgtgatccgggaagtgcgggctgactctgtggggaagttggtaactgtgcgtggaatcgtcactcgtgtctctgaagtcaaacccaagatggtggtggccacttacacttgtgaccagtgtggggcagagacctaccagccgatccagtctcccactttcatgcctctgatcatgtgcccaagccaggagtgccaaaccaaccgctcaggagggcggctgtatctgcagacacggggctccagattcatcaaattccaggagatgaagatgcaagaacatagtgatcaggtgcctgtgggaaatatccctcgtagtatcacggtgctggtagaaggagagaacacaaggattgcccagcctggagaccacgtcagcgtcactggtattttcttgccaatcctgcgcactgggttccgacaggtggtacagggtttactctcagaaacctacctggaagcccatcggattgtgaagatgaacaagagtgaggatgatgagtctggggctggagagctcaccagggaggagctgaggcaaattgcagaggaggatttctacgaaaagctggcagcttcaatcgccccagaaatatacgggcatgaagatgtgaagaaggcactgctgctcctgctagtcgggggtgtggaccagtctcctcgaggcatgaaaatccggggcaacatcaacatctgtctgatgggggatcctggtgtggccaagtctcagctcctgtcatacattgatcgactggcgcctcgcagccagtacacaacaggccggggctcctcaggagtggggcttacggcagctgtgctgagagactccgtgagtggagaactgaccttagagggtggggccctggtgctggctgaccagggtgtgtgctgcattgatgagttcgacaagatggctgaggccgaccgcacagccatccacgaggtcatggagcagcagaccatctccattgccaaggccggcattctcaccacactcaatgcccgctgctccatcctggctgccgccaaccctgcctacgggcgctacaaccctcgccgcagcctggagcagaacatacagctacctgctgcactgctctcccggtttgacctcctctggctgattcaggaccggcccgaccgagacaatgacctacggttggcccagcacatcacctatgtgcaccagcacagccggcagcccccctcccagtttgaacctctggacatgaagctcatgaggcgttacatagccatgtgccgcgagaagcagcccatggtgccagagtctctggctgactacatcacagcagcatacgtggagatgaggcgagaggcttgggctagtaaggatgccacctatacttctgcccggaccctgctggctatcctgcgcctttccactgctctggcacgtctgagaatggtggatgtggtggagaaagaagatgtgaatgaagccatcaggctaatggagatgtcaaaggactctcttctaggagacaaggggcagacagctaggactcagagaccagcagatgtgatatttgccaccgtccgtgaactggtctcagggggccgaagtgtccggttctctgaggcagagcagcgctgtgtatctcgtggcttcacacccgcccagttccaggcggctctggatgaatatgaggagctcaatgtctggcaggtcaatgcttcccggacacggatcacttttgtctgattccagcctgcttgcaaccctggggtcctcttgttccctgctggcctgccccttgggaaggggcagtgatgcctttgaggggaaggaggagcccctctttctcccatgctgcacttactccttttgctaataaaagtgtttgtagattgtc

SEQ ID NO: 82 - DNA, 1527 bp, Homo sapiens
  mRNA (1)..(1527): gi|19923942|ref|NM_138421.1| Homo sapiens serum amyloid A-like 1 (SAAL1)
ggccttcaagcgcgggacgcgacaaagtcatggaccgcaacccctcgccgccgccgccgccgggtcgcgacaaggaggaggaggaggaggtggccggtggagactgcatagggagcacggtctacagcaaacactggctcttcggcgtcctcagcggactcatccagattgttagccctgaaaacaccaaatctagctcagatgatgaggagcagctgacggagcttgatgaagaaatggagaatgaaatttgcagagtatgggatatgtcaatggatgaggacgtggctttatttctccaagaatttaatgctcctgatatattcatgggagtactggccaagtccaagtgtcctcgattaagagaaatctgtgtgggaattttaggtaatatggcctgtttccaggagatatgtgtgtccatcagcagtgataaaaatcttgggcaggtgttattgcactgtttgtatgattcagacccacctactctgctggaaacaagcaggttgttgcttacttgcctttcccaggcagaagtggccagtgtttgggttgaaaggatccaggaacatccagctatttatgatagcatttgcttcattatgtcaagttcaacaaatgttgacttgctggtgaaggtgggggaggttgtggacaagctctttgatttggatgagaaactaatgttagaatgggtcagaaatggggctgctcagcctctggaccaaccccaggaagagtctgaagagcagccagtgtttcggcttgtgccctgtatacttgaagctgccaaacaagtacgttctgaaaatccagaatggcttgatgtttacatgcacattttacaactgcttactacagtggatgatggaattcaagcaattgtacattgtcctgacactggaaaagacatttggaatttactttttgacctggtctgccatgaattctgccagtctgatgatccacccatcattcttcaagaacagaaaacggtgctagcctctgttttttcagtgttgtctgccatctatgcctcacagactgagcaagagtatctaaagatagaaaaagtagatcttcctctaattgacagcctcattcgggtcttacaaaatatggaacagtgtcagaaaaaaccagagaactcggcagagtctaacacagaggaaactaaaaggactgatttaacccaagatgatttccacttgaaaatcttaaaggatattttatgtgaatttctttctaatatttttcaggcattaacaaaggagacggtggctcagggagtaaaggaaggccagttgagcaaacagaagtgttcctctgcatttcaaaaccttcttcctttctatagccctgtggtggaagattttattaaaatcctacgtgaagttgataaggcgcttgctgatgacttggaaaaaaacttcccaagtttgaaggttcagacttaaaacctgaattggaattacttctgtacaagaaataaactttatttttctcactgacaaaaaaaaaaaaaaa

SEQ ID NO: 83 - DNA, 5434 bp, Homo sapiens
  mRNA (1)..(5434): gi|4503350|ref|NM_001379.1| Homo sapiens DNA (cytosine-5-)-methyltransferase 1 (DNMT1)
cgtccgcgtggggggggtgtgtgcccgccttgcgcatgcgtgttccctgggcatggccggctccgttccatccttctgcacagggtatcgcctctctccgtttggtacatcccctcctcccccacgcccggactggggtggtagacgcgcctccgctcatcgcccctccccatcggtttccgcgcgaaaagccggggcgcctgcgctgccgccgccgcgtctgctgaagcctccgagatgccggcgcgtaccgccccagcccgggtgcccacactggccgtcccggccatctcgctgcccgacgatgtccgcaggcggctcaaagatttggaaagagacagcttaacagaaaaggaatgtgtgaaggagaaattgaatctcttgcacgaatttctgcaaacagaaataaagaatcagttatgtgacttggaaaccaaattacgtaaagaagaattatccgaggagggctacctggctaaagtcaaatcccttttaaataaagatttgtccttggagaacggtgctcatgcttacaaccgggaagtgaatggacgtctagaaaacgggaaccaagcaagaagtgaagcccgtagagtgggaatggcagatgccaacagcccccccaaacccctttccaaacctcgcacgcccaggaggagcaagtccgatggagaggctaagcctgaaccttcacctagccccaggattacaaggaaaagcaccaggcaaaccaccatcacatctcattttgcaaagggccctgccaaacggaaacctcaggaagagtctgaaagagccaaatcggatgagtccatcaaggaagaagacaaagaccaggatgagaagagacgtagagttacatccagagaacgagttgctagaccgcttcctgcagaagaacctgaaagagcaaaatcaggaacgcgcactgaaaaggaagaagaaagagatgaaaaagaagaaaagagactccgaagtcaaaccaaagaaccaacacccaaacagaaactgaaggaggagccggacagagaagccagggcaggcgtgcaggctgacgaggacgaagatggagacgagaaagatgagaagaagcacagaagtcaacccaaagatctagctgccaaacggaggcccgaagaaaaagaacctgaaaaagtaaatccacagatttctgatgaaaaagacgaggatgaaaaggaggagaagagacgcaaaacgacccccaaagaaccaacggagaaaaaaatggctcgcgccaaaacagtcatgaactccaagacccaccctcccaagtgcattcagtgcgggcagtacctggacgaccctgacctcaaatatgggcagcacccaccagacgcggtggatgagccacagatgctgacaaatgagaagctgtccatctttgatgccaacgagtctggctttgagagttatgaggcgcttccccagcacaaactgacctgcttcagtgtgtactgtaagcacggtcacctgtgtcccatcgacaccggcctcatcgagaagaatatcgaactcttcttttctggttcagcaaaaccaatctatgatgatgacccgtctcttgaaggtggtgttaatggcaaaaatcttggccccataaatgaatggtggatcactggctttgatggaggtgaaaaggccctcatcggcttcagcacctcatttgccgaatacattctgatggatcccagtcccgagtatgcgcccatatttgggctgatgcaggagaagatctacatcagcaagattgtggtggagttcctgcagagcaattccgactcgacctatgaggacctgatcaacaagatcgagaccacggttcctccttctggcctcaacttgaaccgcttcacagaggactccctcctgcgacacgcgcagtttgtggtggagcaggtggagagttatgacgaggccggggacagtgatgagcagcccatcttcctgacgccctgcatgcgggacctgatcaagctggctggggtcacgctgggacagaggcgagcccaggcgaggcggcagaccatcaggcattctaccagggagaaggacaggggacccacgaaagccaccaccaccaagctggtctaccagatcttcgatactttcttcgcagagcaaattgaaaaggatgacagagaagacaaggagaacgcctttaagcgccggcgatgtggcgtctgtgaggtgtgtcagcagcctgagtgtgggaaatgtaaagcctgcaaggacatggttaaatttggtggcagtggacggagcaagcaggcttgccaagagcggaggtgtcccaatatggccatgaaggaggcagatgacgatgaggaagtcgatgataacatcccagagatgccgtcacccaaaaaaatgcaccaggggaagaagaagaaacagaacaagaatcgcatctcttgggtcggagaagccgtcaagactgatgggaagaagagttactataagaaggtgtgcattgatgcggaaaccctggaagtgggggactgtgtctctgttattccagatgattcctcaaaaccgctgtatctagcaagggtcacggcgctgtgggaggacagcagcaacgggcagatgtttcacgcccactggttctgcgctgggacagacacagtcctcggggccacgtcggaccctctggagctgttcttggtggatgaatgtgaggacatgcagctttcatatatccacagcaaagtgaaagtcatctacaaagccccctccgaaaactgggccatggagggaggcatggatcccgagtccctgctggagggggacgacgggaagacctacttctaccagctgtggtatgatcaagactacgcgagattcgagtcccctccaaaaacccagccaacagaggacaacaagttcaaattctgtgtgagctgtgcccgtctggctgagatgaggcaaaaagaaatccccagggtcctggagcagctcgaggacctggatagccgggtcctctactactcagccaccaagaacggcatcctgtaccgagttggtgatggtgtgtacctgccccctgaggccttcacgttcaacatcaagctgtccagtcccgtgaaacgcccacggaaggagcccgtggatgaggacctgtacccagagcactaccggaaatactccgactacatcaaaggcagcaacctggatgcccctgagccctaccgaattggccggatcaaagagatcttctgtcccaagaagagcaacggcaggcccaatgagactgacatcaaaatccgggtcaacaagttctacaggcctgagaacacccacaagtccactccagcgagctaccacgcagacatcaacctgctctactggagcgacgaggaggccgtggtggacttcaaggctgtgcagggccgctgcaccgtggagtatggggaggacctgcccgagtgcgtccaggtgtactccatgggcggccccaaccgcttctacttcctcgaggcctataatgcaaagagcaaaagctttgaagatcctcccaaccatgcccgtagccctggaaacaaagggaagggcaagggaaaagggaagggcaagcccaagtcccaagcctgtgagccgagcgagccagagatagagatcaagctgcccaagctgcggaccctggatgtgttttctggctgcggggggttgtcggagggattccaccaagcaggcatctctgacacgctgtgggccatcgagatgtgggaccctgcggcccaggcgttccggctgaacaaccccggctccacagtgttcacagaggactgcaacatcctgctgaagctggtcatggctggggagaccaccaactcccgcggccagcggctgccccagaagggagacgtggagatgctgtgcggcgggccgccctgccagggcttcagcggcatgaaccgcttcaattcgcgcacctactccaagttcaaaaactctctggtggtttccttcctcagctactgcgactactaccggccccggttcttcctcctggagaatgtcaggaactttgtctccttcaagcgctccatggtcctgaagctcaccctccgctgcctggtccgcatgggctatcagtgcaccttcggcgtgctgcaggccggtcagtacggcgtggcccagactaggaggcgggccatcatcctggccgcggcccctggagagaagctccctctgttcccggagccactgcacgtgtttgctccccgggcctgccagctgagcgtggtggtggatgacaagaagtttgtgagcaacataaccaggttgagctcgggtcctttccggaccatcacggtgcgagacacgatgtccgacctgccggaggtgcggaatggagcctcggcactggagatctcctacaacggggagcctcagtcctggttccagaggcagctccggggcgcacagtaccagcccatcctcagggaccacatctgtaaggacatgagtgcattggtggctgcccgcatgcggcacatccccttggccccagggtcagactggcgcgatctgcccaacatcgaggtgcggctctcagacggcaccatggccaggaagctgcggtatacccaccatgacaggaagaacggccgcagcagctctggggccctccgtggggtctgctcctgcgtggaagccggcaaagcctgcgaccccgcagccaggcagttcaacaccctcatcccctggtgcctgccccacaccgggaaccggcacaaccactgggctggcctctatggaaggctcgagtgggacggcttcttcagcacaaccgtcaccaaccccgagcccatgggcaagcagggccgcgtgctccacccagagcagcaccgtgtggtgagcgtgcgggagtgtgcccgctcccagggcttccctgacacctaccggctcttcggcaacatcctggacaagcaccggcaggtgggcaatgccgtgccaccgcccctggccaaagccattggcttggagatcaagctttgtatgttggccaaagcccgagagagtgcctcagctaaaataaaggaggaggaagctgctaaggactagttctgccctcccgtcacccctgtttctggcaccaggaatccccaacatgcactgatgttgtgtttttaacatgtcaatctgtccgttcacatgtgtggtacatggtgtttgtggccttggctgacatgaagctgttgtgtgaggttcgcttatcaactaatgatttagtgatcaaattgtgcagtactttgtgcattctggattttaaaagttttttattatgcattatatcaaatctaccactgtatgagtggaaattaagactttatgtagtttttatatgttgtaatatttcttcaaataaatctctcctataaaccaaaaaaaaaaaaaaaaaaaaaaaaaa

SEQ ID NO: 84 - DNA, 8187 bp, Homo sapiens
  mRNA (1)..(8187): gi|16753232|ref|NM_006289.2| Homo sapiens talin 1 (TLN1)
cccgagaagcggcggggcggcgggccggcgggcggggcgcagagccaggcagcgcaggtatagccaggctggagaaaagaagctgccaccatggttgcactttcactgaagatcagcattgggaatgtggtgaagacgatgcagtttgagccgtctaccatggtgtacgacgcctgccgcatcattcgtgagcggatcccagaggccccagctggtcctcccagcgactttgggctctttctgtcagatgatgaccccaaaaagggtatatggctggaggctgggaaagctttggactactacatgctccgaaatggggacactatggagtacaggaagaaacagagacccctgaagatccgtatgctggatggaactgtgaagacgatcatggtggatgactctaagactgtcactgacatgctcatgaccatctgtgcccgcattggcatcaccaatcatgatgaatattcattggttcgagagctgatggaagagaaaaaggaggaaataacagggaccttaagaaaggacaagacattgctgcgagatgaaaagaagatggagaaactaaagcagaaattgcacacagatgatgagttgaactggctggaccatggtcggacactgagggagcagggtgtagaggagcacgagacgctgctgctgcggaggaagttcttttactcagaccagaatgtggattcccgggaccctgtacagctgaacctcctgtatgtgcaggcacgagatgacatcctgaatggctcccaccctgtctcctttgacaaggcctgtgagtttgctggcttccaatgccagatccagtttgggccccacaatgagcagaagcacaaggctggcttccttgacctgaaggacttcctgcccaaggagtatgtgaagcagaagggagagcgtaagatcttccaggcacacaagaattgtgggcagatgagtgagattgaggccaaggtccgctacgtgaagctagcccgttctctcaagacttacggtgtctccttcttcctggtgaaggaaaaaatgaaagggaagaacaagctagtgcccaggcttctgggcatcaccaaggagtgtgtgatgcgagtggatgagaagaccaaggaagtgatccaggagtggaacctcaccaacatcaaacgctgggctgcgtctcccaaaagcttcaccctggattttggagattaccaagatggctattactcagtacagacaactgaaggggagcagattgcacagctcattgccggctacatcgatatcatcctgaagaagaaaaaaagcaaggatcactttgggctggaaggagatgaggagtctactatgctggaggactcagtgtcccccaaaaagtcaacagtcctgcagcagcaatacaaccgggtggggaaagtggagcatggctctgtggccctgcctgccatcatgcgctctggagcctctggtcctgagaatttccaggtgggcagcatgccccctgcccagcagcagattaccagcggccagatgcaccgaggacacatgcctcctctgacttcagcccagcaggcactcactggaaccattaactccagcatgcaggccgtgcaggctgcccaggccaccctggatgactttgacactctgccgcctcttggccaggatgctgcctctaaggcctggcgtaaaaacaagatggatgaatcaaagcatgagatccactctcaggtagatgccatcacagctggtactgcgtctgtggtgaacctgacagcaggggaccctgctgagacagactataccgcagtgggctgtgcagtcaccacaatctcctccaacctgacggagatgtcccgtggggtgaagctgctggctgccttgctggaggacgaaggcggcagtggtcggcccctgttgcaggcagcaaagggccttgcgggagcagtgtcagaactgctgcgcagtgcccaaccagccagtgctgagccccgtcagaacctgctgcaagcagctgggaacgtgggccaggccagtggggagctgttgcaacaaattggggaaagtgatactgacccccacttccaggatgcgctaatgcagctcgccaaagctgtggcaagtgctgcagctgccctggtcctcaaggccaagagtgtggcccagcggacagaggactcgggacttcagacccaagttattgctgcagcaacacagtgtgccctatccacttcccaactagtggcctgtactaaggtggtggcacctacaatcagctcacctgtctgccaagagcaactggtggaggctggacgactggtagccaaagccgtggagggctgtgtgtctgcctcccaggcagctacagaggatgggcaactgttgcgaggggtaggagcagcagccacagctgtcacccaggccctaaatgagctgctgcagcatgtgaaagcccatgccacaggggctgggcctgctggccgttatgaccaggctactgacaccatcctaaccgtcactgagaacatctttagctccatgggtgatgctggggagatggtgggacaggcccgcatcctggcccaagccacatctgacctggtcaatgccatcaaggctgatgctgagggggaaagtgatctggagaactcccgcaagctcttaagtgctgccaagatcctagctgatgccacagccaagatggtagaggctgccaagggagcagctgcccaccctgacagtgaggagcagcagcagcggctgcgggaggcagctgaggggctgcgcatggccaccaatgcagctgcgcagaatgccatcaagaaaaagctggtgcagcgcctggagcatgcagccaagcaggctgcagcctcagccacacagaccatcgctgcagctcagcacgcagcctctacccccaaagcctctgccggcccccagcccctgctggtgcagagctgcaaggcagtggcagagcagattccactgctggtgcagggcgtccgaggaagccaagcccagcctgacagccccagcgctcagcttgccctcattgctgccagccagagcttcctgcagccaggtgggaagatggtggcagctgcaaaggcctcagtgccaacgattcaggaccaggcttcagccatgcagctgagtcagtgtgccaagaacctgggcaccgcgctggctgaactccggacggctgcccagaaggctcaggaagcatgtggacctttggagatggattctgcactgagtgtggtacagaatctagagaaagatctacaggaagtgaaggcagcagctcgagatggcaagcttaaacccttacctggggagacaatggagaagtgtacccaggacctgggcaacagcaccaaagccgtgagctcagccatcgcccagctactgggagaggttgcccagggcaatgagaattatgcaggtattgcagctcgggatgtggcaggtgggctgcggtcactggcccaggccgctaggggagtcgctgcactgacgtcagatcctgcagtgcaggccattgtacttgatacggccagtgatgtgctggacaaggccagcagcctcattgaggaggcgaaaaaggcagctggccatccaggggaccctgagagccagcagcggcttgcccaggtggctaaagcagtgacccaggctctgaaccgctgtgtcagctgcctacctggccagcgcgatgtggataatgccctgagggcagttggagatgccagcaagcgactcctgagtgactcgcttcctcctagcactgggacatttcaagaagctcagagccggttgaatgaagctgctgctgggctgaatcaggcagccacagaactggtgcaggcctctcggggaacccctcaggacctggctcgagcctcaggccgatttggacaggacttcagcaccttcctggaagctggtgtggagatggcaggccaggctccgagccaggaggaccgagcccaagttgtgtccaacttgaagggcatctccatgtcttcaagcaaacttcttctggctgccaaggccctgtccacggaccctgctgcccctaacctcaagagtcagctggctgcagctgccagggcagtaactgacagcatcaatcagctcatcactatgtgcacccagcaggcacccggccagaaggagtgtgataacgccctgcgggaattggagacggtccgggaactcctggagaacccagtccagcccatcaatgacatgtcctactttggttgcctggacagtgtaatggagaactcaaaggtgctgggcgaggccatgactggcatctcccaaaatgccaagaacggaaacctgccagagtttggagatgccatttccacagcctcaaaggcactttgtggcttcaccgaggcagctgcacaggctgcatatctggttggtgtctctgaccccaatagccaagctggacagcaagggctagtggagcccacacagtttgcccgtgcaaaccaggcaattcagatggcctgccagagtttgggagagcctggctgtacccaggcccaggtgctctctgcagccaccattgtggctaaacacacctctgcactgtgtaacagctgtcgcctggcttctgcccgtaccaccaatcctactgccaagcgccagtttgtacagtcagccaaggaggtggccaacagcacagctaatcttgtcaagaccatcaaggcgctagatggggccttcacagaggagaaccgtgcccagtgccgagcagcaacagcccctctgctggaggctgtggacaatctgagtgcctttgcgtccaaccctgagttctccagcattcctgcccagatcagccctgagggtcgggctgccatggagcccattgtgatctctgccaagacaatgttagagagtgccgggggactcatccagacagcccgggccctcgcagtcaatccccgggaccccccgagctggtcggtgctggccggccactcccgtactgtctcagactccatcaagaagctaattacaagcatgagggacaaggctccagggcagctggagtgtgaaacggccattgcagctctgaacagttgtctacgggacctagaccaggcttccctcgctgcagtcagccagcagcttgctccccgtgagggaatctctcaagaggccttgcacactcagatgctcactgcagtccaagagatctcccatctcattgagccgctggccaatgctgcccgggctgaagcctcccagctgggacacaaggtgtcccagatggcgcagtactttgagccgctcaccctggctgcagtgggtgctgcctccaagaccctgagccacccgcagcagatggcactcctggaccagactaaaacattggcagagtctgccctgcagttgctatacactgccaaggaggctggtggtaacccaaagcaagcagctcacacccaggaagccctggaggaggctgtgcagatgatgaccgaggccgtagaggacctgacaacaaccctcaacgaggcagccagtgctgctggggtcgtgggtggcatggtggactccatcacccaggccatcaaccagctagatgaaggaccaatgggtgaaccagaaggttccttcgtggattaccaaacaactatggtgcggacagccaaggccattgcagtgaccgttcaggagatggttaccaagtcaaacaccagcccagaggagctgggccctcttgctaaccagctgaccagtgactatggccgtctggcctcggaggccaagcctgcagcggtggctgctgaaaatgaagagataggttcccatatcaaacaccgggtacaggagctgggccatggctgtgccgctctggtcaccaaggcaggcgccctgcagtgcagccccagtgatgcctacaccaagaaggagctcatagagtgtgcccggagagtctctgagaaggtctcccacgtcctggctgcgctccaggctgggaatcgtggcacccaggcctgcatcacagcagccagcgctgtgtctggtatcattgctgacctcgacaccaccatcatgttcgccactgctggcacgctcaatcgtgagggtactgaaactttcgctgaccaccgggagggcatcctgaagactgcgaaggtgctggtggaggacaccaaggtcctggtgcaaaacgcagctgggagccaggagaagttggcgcaggctgcccagtcctccgtggcgaccatcacccgcctcgctgatgtggtcaagctgggtgcagccagcctgggagctgaggaccctgagacccaggtggtactaatcaacgcagtgaaagatgtagccaaagccctgggagacctcatcagtgcaacgaaggctgcagctggcaaagttggagatgaccctgctgtgtggcagctaaagaactctgccaaggtgatggtgaccaatgtgacatcattgcttaagacagtaaaagccgtggaagatgaggccaccaaaggcactcgggccctggaggcaaccacagaacacatacggcaggagctggcggttttctgttccccagagccacctgccaagacctctaccccagaagacttcatccgaatgaccaagggtatcaccatggcaaccgccaaggccgttgctgctggcaattcctgtcgccaggaagatgtcattgccacagccaatctgagccgccgtgctattgcagatatgcttcgggcttgcaaggaagcagcttaccacccagaagtggcccctgatgtgcggcttcgagccctgcactatggccgggagtgtgccaatggctacctggaactgctggaccatgtactgctgaccctgcagaagccaagcccagaactgaagcagcagttgacaggacattcaaagcgtgtggctggttccgtcactgagctcatccaggctgctgaagccatgaagggaacagaatgggtagacccagaggaccccacagtcattgctgagaatgagctcctgggagctgcagccgccattgaggctgcagccaaaaagctagagcagctgaagccccgggccaaacccaaggaggcagatgagtccttgaactttgaggagcagatactagaagctgccaagtccattgcagcagccaccagtgcactggtaaaggctgcgtcggctgcccagagagaactagtggcccaagggaaggtgggtgccattccagccaatgcactggacgatgggcagtggtcccagggcctcatttctgctgcccggatggtggctgcggccaccaacaatctgtgtgaggcagccaatgcagctgtacaaggccatgccagccaggagaagctcatctcatcagccaagcaggtagctgcctccacagcccagctccttgtggcctgcaaggtcaaggctgaccaggactcggaggcaatgaaacgacttcaggctgctggcaacgcagtgaagcgagcctcagataatctggtgaaagcagcacagaaggctgcagcctttgaagagcaggagaatgagacagtggtggtgaaagagaagatggttggcggcattgcccagatcatcgcagcacaggaagaaatgcttcggaaggaacgagagctggaagaggcgcggaagaaactggcccagatccggcagcagcagtacaagtttctgccttcagagcttcgagatgagcactaaagaagcctcttctatttaatgcagacccggcccagagactgtgcgtgccactaccaaagccttctgggctgtcggggcccaacctgcccaaccccagcactccccaaagtgcctgccaaaccccagggcctggccccgcccagtcccgcagtacatcccctgtcccctccccaaccccaagtgccttcatgccctagggccccccaagtgcctgcccctccccagagtattaacgctccaagagtattattaacgctgctgtacctcgatctgaatctgccggggccccagcccactccaccctgccagcagcttccagccagtccccacagcctcatcagctctcttcaccgttttttgatactatcttcccccacccccagctacccataggggctgcagagttataagccccaaacaggtcatgctccaataaaaatgattctacctacaaaaaaaaaaaaaaaaaaa

SEQ ID NO: 85 - DNA, 2706 bp, Homo sapiens
  mRNA (1)..(2706): gi|4826685|ref|NM_004939.1| Homo sapiens DEAD (Asp-Glu-Ala-Asp) box polypeptide 1 (DDX1)
ctctgtagctgtgaccctgataccgcgtggtgtgctccgaacacatggtgcccagaacgaaggcggcgtccagaagccctaggtcccagaggtccgctcagcggcaggcgcataaggcggggccggcgcgggcctttccttccatcggaaccgttctcccggggctgagtccctgcccggactccgaacgccgaagaccaggggccggaagcgcgcgccgccactgccacgccgtgtcagtcgggagggagggagcgagcaggcgaagccgcggaggacggggtgaagatggcggccttctccgagatgggtgtaatgcctgagattgcacaagctgtggaagagatggattggctcctcccaactgatatccaggctgaatctatcccattgatcttaggaggaggtgatgtacttatggctgcagaaacaggaagtggcaaaactggtgcttttagtattccagttatccagatagtttatgaaactctgaaagaccaacaggaaggcaaaaaaggaaaaacaacaattaaaactggtgcttcagtgctgaacaaatggcagatgaacccatatgacagaggatctgcttttgcaattgggtcagatggtctttgttgtcaaagcagagaagtaaaggaatggcatgggtgtagagctactaaaggattaatgaaagggaaacactactatgaagtatcctgtcatgaccaagggttatgcagggtcgggtggtctaccatgcaggcctctttggacctaggtactgacaagtttggatttggctttggtggaacaggaaagaaatcccataacaaacaatttgataattatggagaggaattcactatgcatgataccattggatgttacctggatatagataagggacatgtcaagttctccaaaaatggaaaagatcttggtctggcatttgaaataccaccacatatgaaaaaccaagccctctttcctgcctgtgttttgaagaatgctgaactgaaatttaacttcggtgaagaggaatttaagtttccaccaaaagatggctttgttgctctttccaaggcaccggatggttacattgtcaaatcacagcactcaggtaatgcacaggtgacacaaacaaagtttctccccaatgctccgaaagctctcattgttgaaccttcccgggagttagctgaacaaactttgaacaacatcaagcagtttaagaaatacattgataatcctaaattaagggagcttctgataattggaggtgttgcagcccgggatcagctctctgttttggaaaatggagtagatatagttgtaggtactccgggaagactagatgacttggtgtcaactggaaagctgaacttatctcaagttagattcctggtcctggatgaagctgatgggcttctttctcaaggttattctgattttataaataggatgcacaatcagattcctcaggttacctctgatggaaaaagacttcaggtgattgtttgctctgccactttgcattctttcgatgtaaagaaactgtccgagaagataatgcattttcctacatgggttgacttaaaaggagaagactctgttccagatactgtacaccatgttgttgtcccagtaaatcccaaaactgacagactctgggaaaggcttggaaagagccacattagaactgatgatgtacatgcaaaagataacacaagacctggtgctaatagtccagagatgtggtctgaagctattaaaatcctgaaaggggagtatgctgtccgggcaatcaaggaacataagatggatcaagcaattatcttctgtagaaccaaaattgactgtgataacttggagcagtactttatacaacaaggaggaggacctgataaaaaaggacaccagttctcatgtgtttgtcttcatggtgacagaaagcctcatgagagaaagcaaaacttggaaagatttaagaaaggagatgtaagattcttgatttgcacagatgtagctgctagaggaattgatatccacggtgttccttatgttataaatgtcactctgcccgatgaaaagcaaaactacgtacatcgaattggcagagtaggaagagctgaaaggatgggtctggcaatttccctggtggcaacagaaaaagaaaaggtttggtaccatgtatgtagcagccgtggaaaagggtgttataacacaagactcaaggaagatggaggctgtaccatatggtacaacgagatgcagttactatctgagatagaagaacacctgaactgtaccatttctcaggttgagccggatataaaggtaccagtggatgaatttgatgggaaagttacctacggtcagaaaagggctgctggtggtggaagctataaaggccatgtggatattttggcacctactgttcaagagttggctgcccttgaaaaggaggcgcagacatctttcctgcatcttggctaccttcctaaccagctgttcagaaccttctgatttttacatttactgaataagatttgagtaatgaaagtctgtagtcttaaaactctaaaacagttgtactgcttccaagcagcagtatttatagtaacgtaagctattaatgctaactcttgcatgtcaagaaacattagtcttaggaattcttcaaaaaatggcatcccaatgaaaataaatttgatgactata

SEQ ID NO: 86 - DNA, 4199 bp, Homo sapiens
  mRNA (1)..(4199): gi|13514819|ref|NM_001357.2| Homo sapiens DEAH (Asp-Glu-Ala-His) box polypeptide 9 (DHX9), transcript variant 1
gaattccggccagagtcacacacggtcctaagagctgggcaccaggaagcgaaggctgatctgaagaagacacttgaatcatgggtgacgttaaaaattttctgtatgcctggtgtggcaaaaggaagatgaccccgacctatgaaattagagcagtggggaacaaaaacaggcagaaattcatgtgtgaggttcaggtggaaggttataattacactggcatggggaattccaccaataaaaaagatgcacaaagcaatgctgccagagactttgttaactatttggttcgaataaatgaaataaagagtgaagaagttccagcttttggggtagcatctccgcccccacttactgatactcctgacactacagcaaatgctgaaggagatttaccaacacaccatggaggacctcttctccacatcttggctctcaaagcagaaaataattctgaggtaggggcctctggctatggtgttcctgggcccacctgggaccgaggagccaacttgaaggattactactcaagaaaggaagaacaagaagtgcaagcgactctagaatcagaagaagtggatttaaatgctgggcttcatggaaactggaccttggaaaatgctaaagctcgtctaatccaatattttcagaaagaaaagatccaaggagaatataagtacacccaagtgggtcctgatcacaacaggagctttattgcagaaatgaccatttatatcaagcagctgggcagaaggatttttgcacgagaacatggatcaaataagaaattggcagcacagtcctgtgccctgtcacttgtcagacaactgtaccatcttggagtggttgaagcttacaccggacttacaaagaagaaggaaggagagacagtggagccttacaaagtaaacctctctcaagatttagagcatcagctgcaaaacatcattcaagagctaaatcttgagattttgcccccgcctgaagatccttctgtgccagttgcactcaacattggcaaattggctcagttcgaaccatctcagcgacaaaaccaagtgggtgtggttccttggtcacctccacaatccaactggaatccttggactagtagcaacattgatgaggggcctctggcttttgctactccagagcaaataagcatggacctcaagaatgaattgatgtaccagttggaacaggatcatgatttgcaagcaatcttgcaggagagagagttactgcctgtgaagaaatttgaaagtgagattctggaagcaatcagccaaaattcagttgtcattattagaggggctactggatgtgggaaaaccacacaggttccccagttcattctagatgactttatccagaatgaccgagcagcagagtgtaacatcgtagtaactcagcccagaagaatcagtgcggtttctgtggcagagcgagttgcatttgaaagaggagaagagcctggaaaaagctgtggatacagcgttcgatttgagtctgtacttcctcgtcctcatgccagtataatgttttgtactgtaggtgtgctcctgagaaaattagaagcaggcattcgaggaatcagtcatgtaattgtagatgaaatacatgaaagagatattaatactagcttccttctggtagtactgcgtgatgttgttcaggcttatcctgaagttcgcattgtttttatgtctgctactattgataccagcatgttttgtgaatatttcttcaattgcccatcattgaagttatggaggacttacccagttcaagaatattttctggaagactgcattcagatgacccactttgttcctccaccaaaagacaaaaagaagaaggataaggatgatgatggtggtgaggatgatgatgcaaattgcaacttgatctgtggtgatgaatatggtccagaaacaaggttgagcatgtctcaattgaacgaaaaggaaactccttttgaactcatcgaggctctacttaagtacattgaaacccttaatgttcctggagctgtgttggtttttttgcctggctggaatctgatttatactatgcagaagcatttggaaatgaatccacattttggaagccatcggtatcagattctacccctgcattctcagattcctcgagaggaacagcgcaaagtgtttgatccagtaccagttggagtaaccaaggttattttgtccacaaatattgctgaaacaagcattaccataaatgatgttgtttatgtcattgactcctgcaagcagaaagtgaaactcttcactgctcacaacaatatgaccaactattctaccgtatgggcatcaaaaacaaaccttgagcaacggaaagggcgagctggccggagtacggctggattctgctttcacctgtgcagccgagctcgttttgagagacttgaaacccacatgacaccagagatgttccgaacaccattgcatgaaattgctcttagcataaaacttctgcgtctaggaggaattggccaatttctggccaaagcaattgaacctccccctttggatgctgtgattgaagcagaacacactcttagagagcttgatgcattagatgccaatgatgagttgactcctttgggacgaatcctggctaaactccccattgagcctcgttttggcaaaatgatgataatggggtgtattttctacgtgggagatgctatctgtaccattgctgctgctacctgctttccagagcctttcgtcaatgaaggaaagcaactgggctatatccatcgaaattttgctggaaacagattttctgatcacgtagcccttttatcagtattccaagcctgggatgatgctagaatgggtggagaagaagcagagatacgtttttgtgagcacaaaagacttaatatggctacactaagaatgacctgggaagccaaagttcagctcaaagagattttgattaattctgggtttccagaagattgtttgttgacacaagtgtttactaacactggaccagataataatttggatgttgttatctccctcctggcctttggtgtgtaccccaatgtatgctatcataaggaaaagaggaagattctcaccactgaagggcgtaatgcacttatccacaaatcatctgttaattgtccttttagtagccaagacatgaattacccatctcccttctttgtatttggtgaaaagattcgaactcgagccatctctgctaaaggcatgactttagtaccccccctgcagttgcttctctttgcctccaagaaagtccaatctgatgggcagattgtgcttgtagatgactggattaaactgcaaatatctcatgaagctgctgcctgtatcactggtctccgggcagccatggaggctttggttgttgaagtaaccaaacaacctgctatcatcagccagttggaccccgtaaatgaacgtatgctgaacatgatccgtcagatctctgagccctcagctgctggtatcaaccttatgattggcagtacacggtatggagatggtccacgtcctcccaagatggcccgatacgacaatggaagcggatatagaaggggaggttctagttacagtggtggaggctatggcggtggatatagcagtggaggctatggtagcggaggctatggtggcagcgcaactccttcgggcaggatatgtgcaggtgttggtggaggctatagaggagtttcccgaggtggctttagaggcaactctggaggagactacagagggcctagtggaggctacagaggatctgggggattccagcgaggaggtggtaggggggcctatggaactggctacttggacattgaagaggaggtggcggctataaaacttggttatgtcagttctgtgtgtagacagtaaggaaaaaaaggcatgctatgtgttacgtgttttttccagtatgtttatttgccaccaaaaagtaaatgcattttcacccattctgtggttcattgtagtttaaggaaaccaagcatatagatgcattagtgattttgtttattttatgtaaaatataacgatcttcttttaaaaataccacagtttgtatttttctttaaggagtaaagatttgcctttaaataacttggtattttcctggctttcgtttaatacaatagaaaataaagtattacaccg

SEQ ID NO: 87 - DNA, 1512 bp, Homo sapiens
  mRNA (1)..(1512): gi|4557700|ref|NM_000422.1| Homo sapiens keratin 17 (KRT17)
ctcctctccagcccttctcctgtgtgcctgcctcctgccgccgccaccatgaccacctccatccgccagttcacctcctccagctccatcaagggctcctccggcctggggggcggctcgtcccgcacctcctgccggctgtctggcggcctgggtgccggctcctgcaggctgggatctgctggcggcctgggcagcaccctcgggggtagcagctactccagctgctacagctttggctctggtggtggctatggcagcagctttgggggtgttgatgggctgctggctggaggtgagaaggccaccatgcagaacctcaatgaccgcctggcctcctacctggacaaggtgcgtgccctggaggaggccaacactgagctggaggtgaagatccgtgactggtaccagaggcaggccccggggcccgcccgtgactacagccagtactacaggacaattgaggagctgcagaacaagatcctcacagccaccgtggacaatgccaacatcctgctacagattgacaatgcccgtctggctgctgatgacttccgcaccaagtttgagacagagcaggccctgcgcctgagtgtggaggccgacatcaatggcctgcgcagggtgctggatgagctgaccctggccagagccgacctggagatgcagattgagaacctcaaggaggagctggcctacctgaagaagaaccacgaggaggagatgaacgccctgcgaggccaggtgggtggtgagatcaatgtggagatggacgctgccccaggcgtggacctgagccgcatcctcaacgagatgcgtgaccagtatgagaagatggcagagaagaaccgcaaggatgccgaggattggttcttcagcaagacagaggaactgaaccgcgaggtggccaccaacagtgagctggtgcagagtggcaagagtgagatctcggagctccggcgcaccatgcaggccttggagatagagctgcagtcccagctcagcatgaaagcatccctggagggcaacctggcggagacagagaaccgctactgcgtgcagctgtcccagatccaggggctgattggcagcgtggaggagcagctggcccagcttcgctgcgagatggagcagcagaaccaggaatacaaaatcctgctggatgtgaagacgcggctggagcaggagattgccacctaccgccgcctgctggagggagaggatgcccacctgactcagtacaagaaagaaccggtgaccacccgtcaggtgcgtaccattgtggaagaggtccaggatggcaaggtcatctcctcccgcgagcaggtccaccagaccacccgctgaggactcagctaccccggccggccacccaggaggcagggagcagccgccccatctgccccacagtctccggcctctccagcctcagccccctgcttcagtcccttccccatgcttccttgcctgatgacaataaagcttgttgactcagctaaaaaaaaaaaaaaa

SEQ ID NO: 88 - DNA, 12515 bp, Homo sapiens
  mRNA (1)..(12515): gi|19923216|ref|NM_002417.2| Homo sapiens antigen identified by monoclonal antibody Ki-67 (MKI67)
ctaccgggcggaggtgagcgcggcgccggctcctcctgcggcggactttgggtgcgacttgacgagcggtggttcgacaagtggccttgcgggccggatcgtcccagtggaagagttgtaaatttgcttctggccttcccctacggattatacctggccttcccctacggattatactcaacttactgtttagaaaatgtggcccacgagacgcctggttactatcaaaaggagcggggtcgacggtccccactttcccctgagcctcagcacctgcttgtttggaaggggtattgaatgtgacatccgtatccagcttcctgttgtgtcaaaacaacattgcaaaattgaaatccatgagcaggaggcaatattacataatttcagttccacaaatccaacacaagtaaatgggtctgttattgatgagcctgtacggctaaaacatggagatgtaataactattattgatcgttccttcaggtatgaaaatgaaagtcttcagaatggaaggaagtcaactgaatttccaagaaaaatacgtgaacaggagccagcacgtcgtgtctcaagatctagcttctcttctgaccctgatgagaaagctcaagattccaaggcctattcaaaaatcactgaaggaaaagtttcaggaaatcctcaggtacatatcaagaatgtcaaagaagacagtaccgcagatgactcaaaagacagtgttgctcagggaacaactaatgttcattcctcagaacatgctggacgtaatggcagaaatgcagctgatcccatttctggggattttaaagaaatttccagcgttaaattagtgagccgttatggagaattgaagtctgttcccactacacaatgtcttgacaatagcaaaaaaaatgaatctcccttttggaagctttatgagtcagtgaagaaagagttggatgtaaaatcacaaaaagaaaatgtcctacagtattgtagaaaatctggattacaaactgattacgcaacagagaaagaaagtgctgatggtttacagggggagacccaactgttggtctcgcgtaagtcaagaccaaaatctggtgggagcggccacgctgtggcagagcctgcttcacctgaacaagagcttgaccagaacaaggggaagggaagagacgtggagtctgttcagactcccagcaaggctgtgggcgccagctttcctctctatgagccggctaaaatgaagacccctgtacaatattcacagcaacaaaattctccacaaaaacataagaacaaagacctgtatactactggtagaagagaatctgtgaatctgggtaaaagtgaaggcttcaaggctggtgataaaactcttactcccaggaagctttcaactagaaatcgaacaccagctaaagttgaagatgcagctgactctgccactaagccagaaaatctctcttccaaaaccagaggaagtattcctacagatgtggaagttctgcctacggaaactgaaattcacaatgagccatttttaactctgtggctcactcaagttgagaggaagatccaaaaggattccctcagcaagcctgagaaattgggcactacagctggacagatgtgctctgggttacctggtcttagttcagttgatatcaacaactttggtgattccattaatgagagtgagggaatacctttgaaaagaaggcgtgtgtcctttggtgggcacctaagacctgaactatttgatgaaaacttgcctcctaatacgcctctcaaaaggggagaagccccaaccaaaagaaagtctctggtaatgcacactccacctgtcctgaagaaaatcatcaaggaacagcctcaaccatcaggaaaacaagagtcaggttcagaaatccatgtggaagtgaaggcacaaagcttggttataagccctccagctcctagtcctaggaaaactccagttgccagtgatcaacgccgtaggtcctgcaaaacagcccctgcttccagcagcaaatctcagacagaggttcctaagagaggaggagaaagagtggcaacctgccttcaaaagagagtgtctatcagccgaagtcaacatgatattttacagatgatatgttccaaaagaagaagtggtgcttcggaagcaaatctgattgttgcaaaatcatgggcagatgtagtaaaacttggtgcaaaacaaacacaaactaaagtcataaaacatggtcctcaaaggtcaatgaacaaaaggcaaagaagacctgctactccaaagaagcctgtgggcgaagttcacagtcaatttagtacaggccacgcaaactctccttgtaccataataatagggaaagctcatactgaaaaagtacatgtgcctgctcgaccctacagagtgctcaacaacttcatttccaaccaaaaaatggactttaaggaagatctttcaggaatagctgaaatgttcaagaccccagtgaaggagcaaccgcagttgacaagcacatgtcacatcgctatttcaaattcagagaatttgcttggaaaacagtttcaaggaactgattcaggagaagaacctctgctccccacctcagagagttttggaggaaatgtgttcttcagtgcacagaatgcagcaaaacagccatctgataaatgctctgcaagccctcccttaagacggcagtgtattagagaaaatggaaacgtagcaaaaacgcccaggaacacctacaaaatgacttctctggagacaaaaacttcagatactgagacagagccttcaaaaacagtatccactgtaaacaggtcaggaaggtctacagagttcaggaatatacagaagctacctgtggaaagtaagagtgaagaaacaaatacagaaattgttgagtgcatcctaaaaagaggtcagaaggcaacactactacaacaaaggagagaaggagagatgaaggaaatagaaagaccttttgagacatataaggaaaatattgaattaaaagaaaacgatgaaaagatgaaagcaatgaagagatcaagaacttgggggcagaaatgtgcaccaatgtctgacctgacagacctcaagagcttgcctgatacagaactcatgaaagacacggcacgtggccagaatctcctccaaacccaagatcatgccaaggcaccaaagagtgagaaaggcaaaatcactaaaatgccctgccagtcattacaaccagaaccaataaacaccccaacacacacaaaacaacagttgaaggcatccctggggaaagtaggtgtgaaagaagagctcctagcagtcggcaagttcacacggacgtcaggggagaccacgcacacgcacagagagccagcaggagatggcaagagcatcagaacgtttaaggagtctccaaagcagatcctggacccagcagcccgtgtaactggaatgaagaagtggccaagaacgcctaaggaagaggcccagtcactagaagacctggctggcttcaaagagctcttccagacaccaggtccctctgaggaatcaatgactgatgagaaaactaccaaaatagcctgcaaatctccaccaccagaatcagtggacactccaacaagcacaaagcaatggcctaagagaagtctcaggaaagcagatgtagaggaagaattcttagcactcaggaaactaacaccatcagcagggaaagccatgcttacgcccaaaccagcaggaggtgatgagaaagacattaaagcatttatgggaactccagtgcagaaactggacctggcaggaactttacctggcagcaaaagacagctacagactcctaaggaaaaggcccaggctctagaagacctggctggctttaaagagctcttccagactcctggtcacaccgaggaattagtggctgctggtaaaaccactaaaataccctgcgactctccacagtcagacccagtggacaccccaacaagcacaaagcaacgacccaagagaagtatcaggaaagcagatgtagagggagaactcttagcgtgcaggaatctaatgccatcagcaggcaaagccatgcacacgcctaaaccatcagtaggtgaagagaaagacatcatcatatttgtgggaactccagtgcagaaactggacctgacagagaacttaaccggcagcaagagacggccacaaactcctaaggaagaggcccaggctctggaagacctgactggctttaaagagctcttccagacccctggtcatactgaagaagcagtggctgctggcaaaactactaaaatgccctgcgaatcttctccaccagaatcagcagacaccccaacaagcacaagaaggcagcccaagacacctttggagaaaagggacgtacagaaggagctctcagccctgaagaagctcacacagacatcaggggaaaccacacacacagataaagtaccaggaggtgaggataaaagcatcaacgcgtttagggaaactgcaaaacagaaactggacccagcagcaagtgtaactggtagcaagaggcacccaaaaactaaggaaaaggcccaacccctagaagacctggctggctggaaagagctcttccagacaccagtatgcactgacaagcccacgactcacgagaaaactaccaaaatagcctgcagatcacaaccagacccagtggacacaccaacaagctccaagccacagtccaagagaagtctcaggaaagtggacgtagaagaagaattcttcgcactcaggaaacgaacaccatcagcaggcaaagccatgcacacacccaaaccagcagtaagtggtgagaaaaacatctacgcatttatgggaactccagtgcagaaactggacctgacagagaacttaactggcagcaagagacggctacaaactcctaaggaaaaggcccaggctctagaagacctggctggctttaaagagctcttccagacacgaggtcacactgaggaatcaatgactaacgataaaactgccaaagtagcctgcaaatcttcacaaccagacctagacaaaaacccagcaagctccaagcgacggctcaagacatccctggggaaagtgggcgtgaaagaagagctcctagcagttggcaagctcacacagacatcaggagagactacacacacacacacagagccaacaggagatggtaagagcatgaaagcatttatggagtctccaaagcagatcttagactcagcagcaagtctaactggcagcaagaggcagctgagaactcctaagggaaagtctgaagtccctgaagacctggccggcttcatcgagctcttccagacaccaagtcacactaaggaatcaatgactaatgaaaaaactaccaaagtatcctacagagcttcacagccagacctagtggacaccccaacaagctccaagccacagcccaagagaagtctcaggaaagcagacactgaagaagaatttttagcatttaggaaacaaacgccatcagcaggcaaagccatgcacacacccaaaccagcagtaggtgaagagaaagacatcaacacgtttttgggaactccagtgcagaaactggaccagccaggaaatttacctggcagcaatagacggctacaaactcgtaaggaaaaggcccaggctctagaagaactgactggcttcagagagcttttccagacaccatgcactgataaccccacagctgatgagaaaactaccaaaaaaatactctgcaaatctccgcaatcagacccagcggacaccccaacaaacacaaagcaacggcccaagagaagcctcaagaaagcagacgtagaggaagaatttttagcattcaggaaactaacaccatcagcaggcaaagccatgcacacgcctaaagcagcagtaggtgaagagaaagacatcaacacatttgtggggactccagtggagaaactggacctgctaggaaatttacctggcagcaagagacggccacaaactcctaaagaaaaggccaaggctctagaagatctggctggcttcaaagagctcttccagacaccaggtcacactgaggaatcaatgaccgatgacaaaatcacagaagtatcctgcaaatctccacaaccagacccagtcaaaaccccaacaagctccaagcaacgactcaagatatccttggggaaagtaggtgtgaaagaagaggtcctaccagtcggcaagctcacacagacgtcagggaagaccacacagacacacagagagacagcaggagatggaaagagcatcaaagcgtttaaggaatctgcaaagcagatgctggacccagcaaactatggaactgggatggagaggtggccaagaacacctaaggaagaggcccaatcactagaagacctggccggcttcaaagagctcttccagacaccagaccacactgaggaatcaacaactgatgacaaaactaccaaaatagcctgcaaatctccaccaccagaatcaatggacactccaacaagcacaaggaggcggcccaaaacacctttggggaaaagggatatagtggaagagctctcagccctgaagcagctcacacagaccacacacacagacaaagtaccaggagatgaggataaaggcatcaacgtgttcagggaaactgcaaaacagaaactggacccagcagcaagtgtaactggtagcaagaggcagccaagaactcctaagggaaaagcccaacccctagaagacttggctggcttgaaagagctcttccagacaccagtatgcactgacaagcccacgactcacgagaaaactaccaaaatagcctgcagatctccacaaccagacccagtgggtaccccaacaatcttcaagccacagtccaagagaagtctcaggaaagcagacgtagaggaagaatccttagcactcaggaaacgaacaccatcagtagggaaagctatggacacacccaaaccagcaggaggtgatgagaaagacatgaaagcatttatgggaactccagtgcagaaattggacctgccaggaaatttacctggcagcaaaagatggccacaaactcctaaggaaaaggcccaggctctagaagacctggctggcttcaaagagctcttccagacaccaggcactgacaagcccacgactgatgagaaaactaccaaaatagcctgcaaatctccacaaccagacccagtggacaccccagcaagcacaaagcaacggcccaagagaaacctcaggaaagcagacgtagaggaagaatttttagcactcaggaaacgaacaccatcagcaggcaaagccatggacaccccaaaaccagcagtaagtgatgagaaaaatatcaacacatttgtggaaactccagtgcagaaactggacctgctaggaaatttacctggcagcaagagacagccacagactcctaaggaaaaggctgaggctctagaggacctggttggcttcaaagaactcttccagacaccaggtcacactgaggaatcaatgactgatgacaaaatcacagaagtatcctgtaaatctccacagccagagtcattcaaaacctcaagaagctccaagcaaaggctcaagatacccctggtgaaagtggacatgaaagaagagcccctagcagtcagcaagctcacacggacatcaggggagactacgcaaacacacacagagccaacaggagatagtaagagcatcaaagcgtttaaggagtctccaaagcagatcctggacccagcagcaagtgtaactggtagcaggaggcagctgagaactcgtaaggaaaaggcccgtgctctagaagacctggttgacttcaaagagctcttctcagcaccaggtcacactgaagagtcaatgactattgacaaaaacacaaaaattccctgcaaatctcccccaccagaactaacagacactgccacgagcacaaagagatgccccaagacacgtcccaggaaagaagtaaaagaggagctctcagcagttgagaggctcacgcaaacatcagggcaaagcacacacacacacaaagaaccagcaagcggtgatgagggcatcaaagtattgaagcaacgtgcaaagaagaaaccaaacccagtagaagaggaacccagcaggagaaggccaagagcacctaaggaaaaggcccaacccctggaagacctggccggcttcacagagctctctgaaacatcaggtcacactcaggaatcactgactgctggcaaagccactaaaataccctgcgaatctcccccactagaagtggtagacaccacagcaagcacaaagaggcatctcaggacacgtgtgcagaaggtacaagtaaaagaagagccttcagcagtcaagttcacacaaacatcaggggaaaccacggatgcagacaaagaaccagcaggtgaagataaaggcatcaaagcattgaaggaatctgcaaaacagacaccggctccagcagcaagtgtaactggcagcaggagacggccaagagcacccagggaaagtgcccaagccatagaagacctagctggcttcaaagacccagcagcaggtcacactgaagaatcaatgactgatgacaaaaccactaaaataccctgcaaatcatcaccagaactagaagacaccgcaacaagctcaaagagacggcccaggacacgtgcccagaaagtagaagtgaaggaggagctgttagcagttggcaagctcacacaaacctcaggggagaccacgcacaccgacaaagagccggtaggtgagggcaaaggcacgaaagcatttaagcaacctgcaaagcggaacgtggacgcagaagatgtaattggcagcaggagacagccaagagcacctaaggaaaaggcccaacccctggaagacctggccagcttccaagagctctctcaaacaccaggccacactgaggaactggcaaatggtgctgctgatagctttacaagcgctccaaagcaaacacctgacagtggaaaacctctaaaaatatccagaagagttcttcgggcccctaaagtagaacccgtgggagacgtggtaagcaccagagaccctgtaaaatcacaaagcaaaagcaacacttccctgcccccactgcccttcaagaggggaggtggcaaagatggaagcgtcacgggaaccaagaggctgcgctgcatgccagcaccagaggaaattgtggaggagctgccagccagcaagaagcagagggttgctcccagggcaagaggcaaatcatccgaacccgtggtcatcatgaagagaagtttgaggacttctgcaaaaagaattgaacctgcggaagagctgaacagcaacgacatgaaaaccaacaaagaggaacacaaattacaagactcggtccctgaaaataagggaatatccctgcgctccagacgccaagataagactgaggcagaacagcaaataactgaggtctttgtattagcagaaagaatagaaataaacagaaatgaaaagaagcccatgaagacctccccagagatggacattcagaatccagatgatggagcccggaaacccatacctagagacaaagtcactgagaacaaaaggtgcttgaggtctgctagacagaatgagagctcccagcctaaggtggcagaggagagcggagggcagaagagtgcgaaggttctcatgcagaatcagaaagggaaaggagaagcaggaaattcagactccatgtgcctgagatcaagaaagacaaaaagccagcctgcagcaagcactttggagagcaaatctgtgcagagagtaacgcggagtgtcaagaggtgtgcagaaaatccaaagaaggctgaggacaatgtgtgtgtcaagaaaataacaaccagaagtcatagggacagtgaagatatttgacagaaaaatcgaactgggaaaaatataataaagttagttttgtgataagttctagtgcagtttttgtcataaattacaagtgaattctgtaagtaaggctgtcagtctgcttaagggaagaaaactttggatttgctgggtctgaatcggcttcataaactccactgggagcactgctgggctcctggactgagaatagttgaacaccgggggctttgtgaaggagtctgggccaaggtttgccctcagctttgcagaatgaagccttgaggtctgtcaccacccacagccaccctacagcagccttaactgtgacacttgccacactgtgtcgtcgtttgtttgcctatgttctccagggcacggtggcaggaacaactatcctcgtctgtcccaacactgagcaggcactcggtaaacacgaatgaatggataagcgcacggatgaatggagcttacaagatctgtctttccaatggccgggggcatttggtccccaaattaaggctattggacatctgcacaggacagtcctatttttgatgtcctttcctttctgaaaataaagttttgtgctttggagaatgactcgtgagcacatctttagggaccaagagtgactttctgtaaggagtgactcgtggcttgccttggtctcttgggaatacttttctaactagggttgctctcacctgagacattctccacccgcggaatctcagggtcccaggctgtgggccatcacgacctcaaactggctcctaatctccagctttcctgtcattgaaagcttcggaagtttactggctctgctcccgcctgttttctttctgactctatctggcagcccgatgccacccagtacaggaagtgacaccagtactctgtaaagcatcatcatccttggagagactgagcactcagcaccttcagccacgatttcaggatcgcttccttgtgagccgctgcctccgaaatctcctttgaagcccagacatctttctccagcttcagacttgtagatataactcgttcatcttcatttactttccactttgccccctgtcctctctgtgttccccaaatcagagaatagcccgccatcccccagatcacctgtctggattcctccccattcacccaccttgccaggtgcaggtgaggatggtgcaccagacagggtagctgtcccccaaaatgtgccctgtgcgggcagtgccctgtctccacgtttgtttccccagtgtctggcggggagccaggtgacatcataaatacttgctgaatgaatgcagaaatcagcggtactgacttgtactatattggctgccatgatagggttctcacagcgtcatccatgatcgtaagggagaatgacattctgcttgagggagggaatagaaaggggcagggaggggacatctgagggcttcacagggctgcaaagggtacagggattgcaccagggcagaacaggggagggtgttcaaggaagagtggctcttagcagaggcactttggaaggtgtgaggcataaatgcttccttctacgtaggccaacctcaaaactttcagtaggaatgttgctatgatcaagttgttctaacactttagacttagtagtaattatgaacctcacatagaaaaatttcatccagccatatgcctgtggagtggaatattctgtttagtagaaaaatcctttagagttcagctctaaccagaaatcttgctgaagtatgtcagcaccttttctcaccctggtaagtacagtatttcaagagcacgctaagggtggttttcattttacagggctgttgatgatgggttaaaaatgttcatttaagggctacccccgtgtttaatagatgaacaccacttctacacaaccctccttggtactgggggagggagagatctgacaaatactgcccattcccctaggctgactggatttgagaacaaatacccacccatttccaccatggtatggtaacttctctgagcttcagtttccaagtgaatttccatgtaataggacattcccattaaatacaagctgtttttactttttcgcctcccagggcctgtgcgatctggtcccccagcctctcttgggctttcttacactaactctgtacctaccatctcctgcctcccttaggcaggcacctccaaccaccacacactccctgctgttttccctgcctggaactttcccaccagccccaccaagatcatttcatccagtcctgagctcagcttaagggaggcttcttgcctgtgggttccctcacccccatgcctgtcctccaggctggggcaggttcttagtttgcctggaattgttctgtacctctttgtagcacgtagtgttgtgaaactaagccactaattgagtttctggctcccctcctggggttgtaagttttgttcattcatgagggccgactgtatttcctggttactgtatcccagtgaccagccacaggagatgtccaataaagtatgtgatgaaatggtcttaaaaaaaaaaaaaaaaaaaaaa

SEQ ID NO: 89 - DNA, 2703 bp, Homo sapiens
  mRNA (1)..(2703): gi|14141151|ref|NM_005968.2| Homo sapiens heterogeneous nuclear ribonucleoprotein M (HNRPM), transcript variant 1
cgcgccgggaacagccagtcggtgcctaacgcgagtgtatctcgagagagaagcgatcaacagctgccggtctgcgcctgcgcggcgacggggcgtggccgcgggcgagtggggccaaggaggcagccgggagcgggggcgcaggtgttactggttgcgtcgggtcacgtgggcgcgcagcagaccgcggtgcagcccgttcgctcacacaaagcccagacgcggagaaaatggcggcaggggtcgaagcggcggcggaggtggcggcgacggagatcaaaatggaggaagagagcggcgcgcccggcgtgccgagcggcaacggggctccgggccctaagggtgaaggagaacgacctgctcagaatgagaagaggaaggagaaaaacataaaaagaggaggcaatcgctttgagccatatgccaatccaactaaaagatacagagccttcattacaaacataccttttgatgtgaaatggcagtcacttaaagacctggttaaagaaaaagttggtgaggtaacatacgtggagctcttaatggacgctgaaggaaagtcaaggggatgtgctgttgttgaattcaagatggaagagagcatgaaaaaagctgcggaagtcctaaacaagcatagtctgagcggaagaccactgaaagtcaaagaagatcctgatggtgaacatgccaggagagcaatgcaaaaggtgatggctacgactggtgggatgggtatgggaccaggtggcccaggaatgattactatcccacccagtatcctaaataatcccaacatcccaaatgagattatccatgcattacaggctggaagacttggaagcacagtatttgtagcaaatctggattataaagttggctggaagaaactgaaggaagtatttagtatggctggtgtggtggtccgagcagacattcttgaagataaagatggaaaaagtcgtggaataggcactgttacttttgaacagtccattgaagctgtgcaagctatatctatgttcaatggccagctgctatttgatagaccaatgcacgtcaagatggatgagagggccttaccaaaaggagatttcttccctcctgagcgtccacaacaacttccccatggccttggtggtattggcatggggttaggaccaggagggcaacccattgatgccaatcacctgaataaaggcatcggaatgggaaacataggtcccgcaggaatgggaatggaaggcataggatttggaataaataaaatgggaggaatggaggggccctttggtggtggtatggaaaacatgggtcgatttggatctgggatgaacatgggcaggataaatgaaatcctaagtaatgcactgaagagaggagagatcattgcaaagcagggaggaggtggaggtggaggaagcgtccctgggatcgagaggatgggtcctggcattgaccgcctcgggggtgccggcatggagcgcatgggcgcgggcctgggccacggcatggatcgcgtgggctccgagatcgagcgcatgggcctggtcatggaccgcatgggctccgtggagcgcatgggctccggcattgagcgcatgggcccgctgggcctcgaccacatggcctccagcattgagcgcatgggccagaccatggagcgcattggctctggcgtggagcgcatgggtgccggcatgggcttcggccttgagcgcatggccgctcccatcgaccgtgtgggccagaccattgagcgcatgggctctggcgtggagcgcatgggccctgccatcgagcgcatgggcctgagcatggagcgcatggtgcccgcaggtatgggagctggcctggagcgcatgggccccgtgatggatcgcatggccaccggcctggagcgcatgggcgccaacaatctggagcggatgggcctggagcgcatgggcgccaacagcctcgagcgcatgggcctggagcgcatgggtgccaacagcctcgagcgcatgggccccgccatgggcccggccctgggcgctggcattgagcgcatgggcctggccatgggtggcggtggcggtgccagctttgaccgtgccatcgagatggagcgtggcaacttcggaggaagcttcgcaggttcctttggtggagctggaggccatgctcctggggtggccaggaaggcctgccagatatttgtgagaaatctgccattcgatttcacatggaagatgctaaaggacaaattcaacgagtgcggccacgtgctgtacgccgacatcaagatggagaatgggaagtccaaggggtgtggtgtggttaagttcgagtcgccagaggtggccgagagagcctgccggatgatgaatggcatgaagctgagtggccgagagattgacgttcgaattgatagaaacgcttaagcagttgccttttttaaacatcgatacgagacctctgaatttgtattttttcttgttaaccattttaatttgttggctggatgtataaagatgtttaaaaaattcagttgctttttggggtaatttgaattacttttttaatgactggggttccatttgactgtttgcattgagattgcaatgtgcgcaattttttttgtagttgtggcatcttgttgacatcgaatatgactttgataataaataccggttcctgaaaaaaaaaaaaaaaaaaaaaaaa

SEQ ID NO: 90 - DNA, 1274 bp, Homo sapiens
  mRNA (1)..(1274): gi|83656778|ref|NM_003754.2| Homo sapiens eukaryotic translation initiation factor 3, subunit 5 epsilon, 47kDa (EIF3S5)
atttccgcttccgcctccttctttctcgacaagatggccacaccggcggtaccagtaagtgctcctccggccacgccaaccccagtcccggcggcggccccagcctcagttccagcgccaacgccagcaccggctgcggctccggttcccgctgcggctccagcctcatcctcagaccctgcggcagcagcggctgcaactgcggctcctggccagaccccggcctcagcgcaagctccagcgcagaccccagcgcccgctctgcctggtcctgctcttccagggcccttccccggcggccgcgtggtcaggctgcacccagtcattttggcctccattgtggacagctacgagagacgcaacgagggtgctgcccgagttatcgggaccctgttgggaactgtcgacaaacactcagtggaggtcaccaattgcttttcagtgccgcacaatgagtcagaagatgaagtggctgttgacatggaatttgctaagaatatgtatgaactgcataaaaaagtttctccaaatgagctcatcctgggctggtacgctacgggccatgacatcacagagcactctgtgctgatccacgagtactacagccgagaggcccccaaccccatccacctcactgtggacacaagtctccagaacggccgcatgagcatcaaagcctacgtcagcactttaatgggagtccctgggaggaccatgggagtgatgttcacgcctctgacagtgaaatacgcgtactacgacactgaacgcatcggagttgacctgatcatgaagacctgctttagccccaacagagtgattggactctcaagtgacttgcagcaagtaggaggggcatcagctcgcatccaggatgccctgagtacagtgttgcaatatgcagaggatgtactgtctggaaaggtgtcagctgacaatactgtgggccgcttcctgatgagcctggttaaccaagtaccgaaaatagttcccgatgactttgagaccatgctcaacagcaacatcaatgaccttttgatggtgacctacctggccaacctcacacagtcacagattgcactcaatgaaaaacttgtaaacctgtgaatggaccccaagcagtacacttgctggtctaggtattaaccccaggactcagaagtgaaggagaaatgggttttttgtggtcttgagtcacactgagatagtcagttgtgtgtgactctaataaacggagcctaccttttgtaaattaaaaaaaaaaaaaaaaaaaa

SEQ ID NO: 91 - DNA, 3471 bp, Homo sapiens
  mRNA (1)..(3471): gi|14249457|ref|NM_032789.1| Homo sapiens poly (ADP-ribose) polymerase family, member 10 (PARP10)
tttgctgaggggcaggcacaggagtcctggctgagctcatggcctgaggctgcctagcggccacggggaatggttgcaatggcggaggcagaggcaggggtggcagtggaggtccgtggactgccccctgccgtgcccgacgagctgctcactctctactttgaaaaccgccgacgctctggagggggacctgtgttgagctggcagagactgggctgtgggggcgtcctcaccttcagagagcctgcagacgccgagagggtcttggcccaggcagatcatgaactacatggtgcccagctgagcctgcggccagctccaccacgagcccctgcacgcctgctgctccaaggactgccccctggcaccacgccccagcgcttggagcagcatgtccaggccttgctgcgggcctcggggctcccagtacagccttgctgtgccttggccagcccccggccagaccgggctctggtccagttgcccaagcccctttctgaggcagatgtccgtgtcctggaggagcaggcccagaatctgggcctggaggggaccttggtgtccctggcccgggttccccaggcccgagcggtgcgtgtggtgggggatggtgcctctgtggacctgctgttgctggagttgtacctggagaatgagcgccgcagtggtggggggcccctggaggacctgcaacgcctacccgggcccctgggcactgttgcctccttccagcagtggcaagtggcagaacgagtgttgcagcaggagcaccggttgcagggctcagagctgagccttgtcccccactacgacgtcctggagcccgaggagctggctgagaacaccagtggaggggaccacccgtccacccaggggcctagggctaccaagcatgctctcctgaggaccggagggttggtgacggctctgcagggtgcagggactgtgacaatgggctctggcgaggaaccagggcagtcaggggcctctctgaggacaggtcccatagtgcagggtagagggattatgacaacaggctctggccaggaaccagggcagtcagggacctctctgaggacaggtcccatggggtctctgggacaggcagagcaagtcagctcgatgcccatggggtctctggaacatgaggggctggtaagcctgaggcctgtggggttgcaggaacaggaggggcccatgagcctggggcctgtggggtctgcaggcccagtggagacctctaaggggttgccggggcaggagggcctggtggaaattgccatggactcaccagagcaagaggggctggtgggtcccatggagatcaccatggggtctctggagaaggcagggcctgtgagcccaggatgtgtgaagctggcagggcaggagggcctggtggagatggtgctattgatggagccaggggcgatgcgcttcctgcagctctaccatgaggaccttcttgcgggcctgggagacgtcgctctcttgccacttgaaggaccggatatgactggctttcggctctgtggagcccaggcttcctgccaggcggctgaggagtttctgcggagcctgctgggcagcattagctgccatgtgttgtgcctggagcactcgggcagcgccaggtttctcctgggcccagaagggcagcaccttctccaggggctggaggctcagttccagtgtgtctttgggacagagcgcctggccacagccacgttggacacaggccttgaagaggtggaccctaccgaggccctcccagtgctccctggcaacgcccacaccctgtggaccccagacagtacaggtggtgaccaggaggacgtgagcctggaggaggtccgagaactgctggccaccctggagggcctagacctagacggggaggactggctgcctcgggagctggaggaggaagggcctcaggagcagccagaggaggaggcgaccccagggcatgaggaggaggagcctgtggcccccagcactgtggcacccaggtggctggaggaggaggccgctctgcagctggccctccaccggtcactggagcctcaaggtcaggtggctgagcaggaggaggctgctgccctgcggcaagccctaaccctctccctgctggagcagcccccgttggaggcagaagagcccccagatggggggactgatggcaaggcccagctggtggtgcactcggcctttgagcaggatgtggaggagctggaccgggcgctcagggctgccttggaggtccacgtccaggaggagacggtggggccctggcgccgcacactgcctgcagagctgcgtgctcgcctggagcggtgccatggtgtgagtgttgccctgcgtggtgactgcaccatcctccgtggcttcggggcccaccctgcccgtgctgcccgccacttggtggcacttctggctggcccctgggatcagagtttggcctttcccttggcagcttcaggccctaccttggcggggcagacgctgaaggggccctggaacaacctggagcgtctggcagagaacaccggggagttccaggaggtggtgcgggccttctacgacaccctggacgctgcccgcagcagcatccgcgtcgttcgtgtggagcgcgtgtcgcacccgctgctgcagcagcagtatgagctgtaccgggagcgcctgctgcagcgatgcgagcggcgcccggtggagcaggtgctgtaccacggcacgacggcaccggcagtgcctgacatctgcgcccacggcttcaaccgcagcttctgcggccgcaacgccacggtctacgggaagggcgtgtatttcgccaagcgcgcctccctgtcggtgcaggaccgctactcgccccccaacgccgatggccataaggcggtgttcgtggcacgggtgctgactggcgactacgggcagggccgccgcggtctgcgggcgccccctctgcggggtcctggccacgtgctcctgcgctacgacagcgccgtggactgcatctgccagcccagcatcttcgtcatcttccacgacacccaggcgctgcccacccacctcatcacctgcgagcacgtgccccgcgcttcccccgacgacccctctgggctcccgggccgctccccagacacttaaccgaaggggccaccctctggcctcctgcttcccaggctcccagctccgcacaggctgatgctccccgcccccaactgtggccgcctgagctgtccccggggacgcccctgcctccctctgcgggctccagaaggcggtgtgggggatggcggtcagcagcggccgagaggggctgggctaggtcccagcctgggccgaccccaccaccaggggtcagcagagcccaggaggcgacactgcccgcccgccgctcccagacctcgcccgagtcggctctgttgtttgaataaacgtgaacgtgaacccaggcggaagggacccggg

SEQ ID NO: 92 - DNA, 7474 bp, Homo sapiens
  mRNA (1)..(7474): gi|51317362|ref|NM_002473.3| Homo sapiens myosin, heavy polypeptide 9, non-muscle (MYH9)
atacgactcactatagggcgatcaggtgctggaaagaaggctaagcaaggctgacctgctgcagctcccgcctcgtgcgctcgccccacccggccgccgcccgagcgctcgagaaagtcctctcgggagaagcagcgcctgttcccggggcagatccaggttcaggtcctggctataagtcaccatggcacagcaagctgccgataagtatctctatgtggataaaaacttcatcaacaatccgctggcccaggccgactgggctgccaagaagctggtatgggtgccttccgacaagagtggctttgagccagccagcctcaaggaggaggtgggcgaagaggccatcgtggagctggtggagaatgggaagaaggtgaaggtgaacaaggatgacatccagaagatgaacccgcccaagttctccaaggtggaggacatggcagagctcacgtgcctcaacgaagcctcggtgctgcacaacctcaaggagcgttactactcagggctcatctacacctattcaggcctgttctgtgtggtcatcaatccttacaagaacctgcccatctactctgaagagattgtggaaatgtacaagggcaagaagaggcacgagatgccccctcacatctatgccatcacagacaccgcctacaggagtatgatgcaagaccgagaagatcaatccatcttgtgcactggtgaatctggagctggcaagacggagaacaccaagaaggtcatccagtatctggcgtacgtggcgtcctcgcacaagagcaagaaggaccagggcgagctggagcggcagctgctgcaggccaaccccatcctggaggccttcgggaacgccaagaccgtgaagaatgacaactcctcccgcttcggcaaattcattcgcatcaactttgatgtcaatggctacattgttggagccaacattgagacttatcttttggagaaatctcgtgctatccgccaagccaaggaagaacggaccttccacatcttctattatctcctgtctggggctggagagcacctgaagaccgatctcctgttggagccgtacaacaaataccgcttcctgtccaatggacacgtcaccatccccgggcagcaggacaaggacatgttccaggagaccatggaggccatgaggattatgggcatcccagaagaggagcaaatgggcctgctgcgggtcatctcaggggttcttcagctcggcaacatcgtcttcaagaaggagcggaacactgaccaggcgtccatgcccgacaacacagctgcccaaaaggtgtcccatctcttgggtatcaatgtgaccgatttcaccagaggaatcctcaccccgcgcatcaaggtgggacgggattacgtccagaaggcgcagactaaagagcaggctgactttgccatcgaggccttggccaaggcgacctatgagcggatgttccgctggctggtgctgcgcatcaacaaggctctggacaagaccaagaggcagggcgcctccttcatcgggatcctggacattgccggcttcgagatctttgatctgaactcgtttgagcagctgtgcatcaattacaccaatgagaagctgcagcagctcttcaaccacaccatgttcatcctggagcaggaggagtaccagcgcgagggcatcgagtggaacttcatcgactttggcctcgacctgcagccctgcatcgacctcattgagaagccagcaggccccccgggcattctggccctgctggacgaggagtgctggttccccaaagccaccgacaagagcttcgtggagaaggtgatgcaggagcagggcacccaccccaagttccagaagcccaagcagctgaaggacaaagctgatttctgcattatccactatgccggcaaggtggattacaaagctgacgagtggctgatgaagaacatggatcccctgaatgacaacatcgccacactgctccaccagtcctctgacaagtttgtctcggagctgtggaaggatgtggaccgcatcatcggcctggaccaggtggccggcatgtcggagaccgcactgcccggggccttcaagacgcggaagggcatgttccgcactgtggggcagctttacaaggagcagctggccaagctgatggctacgctgaggaacacgaaccccaactttgtccgctgcatcatccccaaccacgagaagaaggccggcaagctggacccgcatctcgtgctggaccagctgcgctgcaacggtgttctcgagggcatccgtatctgccgccagggcttccccaacagggtggtcttccaggagtttcggcagagatatgagatcctgactccaaactccattcccaagggtttcatggacgggaagcaggcgtgcgtgctcatgataaaagccctggagctcgacagcaatctgtaccgcattggccagagcaaagtcttcttccgtgccggtgtgctggcccacctggaggaggagcgagacctgaagatcaccgacgtcatcatagggttccaggcctgctgcaggggctacctggccaggaaagcatttgccaagcggcagcagcagcttaccgccatgaaggtcctccagcggaactgcgctgcctacctgaagctgcggaactggcagtggtggcggctcttcaccaaggtcaagccgctgctgcaggtgagccggcaggaggaggagatgatggccaaggaggaggagctggtgaaggtcagagagaagcagctggctgcggagaacaggctcacggagatggagacgctgcagtctcagctcatggcagagaaattgcagctgcaggagcagctccaggcagaaaccgagctgtgtgccgaggctgaggagctccgggcccgcctgaccgccaagaagcaggaattagaagagatctgccatgacctagaggccagggtggaggaggaggaggagcgctgccagcacctgcaggcggagaagaagaagatgcagcagaacatccaggagcttgaggagcagctggaggaggaggagagcgcccggcagaagctgcagctggagaaggtgaccaccgaggcgaagctgaaaaagctggaggaggagcagatcatcctggaggaccagaactgcaagctggccaaggaaaagaaactgctggaagacagaatagctgagttcaccaccaacctcacagaagaggaggagaaatctaagagcctcgccaagctcaagaacaagcatgaggcaatgatcactgacttggaagagcgcctccgcagggaggagaagcagcgacaggagctggagaagacccgccggaagctggagggagactccacagacctcagcgaccagatcgccgagctccaggcccagatcgcggagctcaagatgcagctggccaagaaagaggaggagctccaggccgccctggccagagtggaagaggaagctgcccagaagaacatggccctcaagaagatccgggagctggaatctcagatctctgaactccaggaagacctggagtctgagcgtgcttccaggaataaagctgagaagcagaaacgggaccttggggaagagctagaggcgctgaaaacagagttggaggacacgctggattccacagctgcccagcaggagctcaggtcaaaacgtgagcaggaggtgaacatcctgaagaagaccctggaggaggaggccaagacccacgaggcccagatccaggagatgaggcagaagcactcacaggccgtggaggagctggcggagcagctggagcagacgaagcgggtgaaagcaaacctcgagaaggcaaagcagactctggagaacgagcggggggagctggccaacgaggtgaaggtgctgctgcagggcaaaggggactcggagcacaagcgcaagaaagtggaggcgcagctgcaggagctgcaggtcaagttcaacgagggagagcgcgtgcgcacagagctggccgacaaggtcaccaagctgcaggtggagctggacaacgtgaccgggcttctcagccagtccgacagcaagtccagcaagctcaccaaggacttctccgcgctggagtcccagctgcaggacactcaggagctgctgcaggaggagaaccggcagaagctgagcctgagcaccaagctcaagcaggtggaggacgagaagaattccttccgggagcagctggaggaggaggaggaggccaagcacaacctggagaagcagatcgccaccctccatgcccaggtggccgacatgaaaaagaagatggaggacagtgtggggtgcctggaaactgctgaggaggtgaagaggaagctccagaaggacctggagggcctgagccagcggcacgaggagaaggtggccgcctacgacaagctggagaagaccaagacgcggctgcagcaggagctggacgacctgctggtggacctggaccaccagcgccagagcgcgtgcaacctggagaagaagcagaagaagtttgaccagctcctggcggaggagaagaccatctctgccaagtatgcagaggagcgcgaccgggctgaggcggaggcccgagagaaggagaccaaggctctgtcgctggcccgggccctggaggaagccatggagcagaaggcggagctggagcggctcaacaagcagttccgcacggagatggaggaccttatgagctccaaggatgatgtgggcaagagtgtccacgagctggagaagtccaagcgggccctagagcagcaggtggaggagatgaagacgcagctggaagagctggaggacgagctgcaggccaccgaagatgccaagctgcggttggaggtcaacctgcaggccatgaaggcccagttcgagcgggacctgcagggccgggacgagcagagcgaggagaagaagaagcagctggtcagacaggtgcgggagatggaggcagagctggaggacgagaggaagcagcgctcgatggcagtggccgcccggaagaagctggagatggacctgaaggacctggaggcgcacatcgactcggccaacaagaaccgggacgaagccatcaaacagctgcggaagctgcaggcccagatgaaggactgcatgcgcgagctggatgacacccgcgcctctcgtgaggagatcctggcccaggccaaagagaacgagaagaagctgaagagcatggaggccgagatgatccagttgcaggaggaactggcagccgcggagcgtgccaagcgccaggcccagcaggagcgggatgagctggctgacgagatcgccaacagcagcggcaaaggagccctggcgttagaggagaagcggcgtctggaggcccgcatcgcccagctggaggaggagctggaggaggagcagggcaacacggagctgatcaacgaccggctgaagaaggccaacctgcagatcgaccagatcaacaccgacctgaacctggagcgcagccacgcccagaagaacgagaatgctcggcagcagctggaacgccagaacaaggagcttaaggtcaagctgcaggagatggagggcactgtcaagtccaagtacaaggcctccatcaccgccctcgaggccaagattgcacagctggaggagcagctggacaacgagaccaaggagcgccaggcagcctgcaaacaggtgcgtcggaccgagaagaagctgaaggatgtgctgctgcaggtggatgacgagcggaggaacgccgagcagtacaaggaccaggccgacaaggcatctacccgcctgaagcagctcaagcggcagctggaggaggccgaagaggaggcccagcgggccaacgcctcccgccggaaactgcagcgcgagctggaggacgccactgagacggccgatgccatgaaccgcgaagtcagctccctaaagaacaagctcaggcgcggggacctgccgtttgtcgtgccccgccgaatggcccggaaaggcgccggggatggctccgacgaagaggtagatggcaaagcggatggggctgaggccaaacctgccgaataagcctcttctcctgcagcctgagatggatggacagacagacaccacagcctccccttcccagaccccgcagcacgcctctccccaccttcttgggactgctgtgaacatgcctcctcctgccctccgccccgtccccccatcccgtttccctccaggtgttgttgagggcatttggcttcctctgctgcatccccttccagctccctcccctgctcagaatctgataccaaagagacagggcccgggcccaggcagagagcgaccagcaggctcctcagccctctcttgccaaaaagcacaagatgttgaggcgagcagggcaggcccccggggaggggccagagttttctatgaatctatttttcttcagactgaggccttttggtagtcggagcccccgcagtcgtcagcctccctgacgtctgccaccagcgcccccactcctcctcctttctttgctgtttgcaatcacacgtggtgacctcacacacctctgccccttgggcctcccactcccatggctctgggcggtccagaaggagcaggccctgggcctccacctctgtgcagggcacagaaggctggggtggggggaggagtggattcctccccaccctgtcccaggcagcgccactgtccgctgtctccctcctgattctaaaatgtctcaagtgcaatgccccctcccctcctttaccgaggacagcctgcctctgccacagcaaggctgtcggggtcaagctggaaaggccagcagccttccagtggcttctcccaacactcttggggaccaaatatatttaatggttaagggacttgtcccaagtctgacagccagagcgttagaggggccagcggccctcccaggcgatcttgtgtctactctaggactgggcccgagggtggtttacctgcaccgttgactcagtatagtttaaaaatctgccacctgcacaggtatttttgaaagcaaaataaggttttcttttttcccctttcttgtaataaatgataaaattccgagtctttctcactgcctttgtttagaagagagtagctcgtcctcactggtctacactggttgccgaatttacttgtattcctaactgttttgtatatgctgcattgagacttacggcaagaaggcattttttttttttaaaggaaacaaactctcaaatcatgaagtgatataaaagctgcatatgcctacaaagctctgaattcaggtcccagttgctgtcacaaaggagtgagtgaaactcccaccctacccccttttttatataataaaagtgccttagcatgtgttgcagctgtcaccactacagtaagctggtttacagatgttttccactgagcatcacaataaagagaaccatgtgctaaaaaaaaaaaaaaaaaaaa

SEQ ID NO: 93 - DNA, 6134 bp, Homo sapiens
  mRNA (1)..(6134): gi|37574611|ref|NM_002972.1| Homo sapiens SET binding factor 1 (SBF1), transcript variant 1
gctggctgggaagatggcggcgggaacctgggccgccgccgccgccgccgccgccgccgcggagcgaaccaggggtgtccggggtgcgcggtccagggccggggccgggccatgagcgcgccgtcctcgagtccccgagccgcggagcccgcccgcgcccctcgggccgccccgcgtccctcgccatggcgcggctcgcggactacttcgtgctggtggcgttcgggccgcacccgcgcgggagtggggaaggccagggccagattctgcagcgcttcccagagaaggactgggaggacaacccattcccccagggcatcgagctgttttgccagcccagcgggtggcagctgtgtcccgagaggaatccaccgaccttctttgttgctgtcctcaccgacatcaactccgagcgccactactgcgcctgcttgaccttctgggagccagcggagccttcacaggaaacgacgcgcgtggaggatgccacagagagggaggaagagggggatgagggaggccagacccacctgtctcccacagcacctgccccatctgcccagctgtttgcaccgaagacgctggtactggtgtcgcgactcgaccacacggaggtgttcaggaacagccttggcctcatctatgccatccacgtggagggcctgaatgtgtgcctggagaacgtgattgggaacctgctgacgtgcactgtgcccctggctgggggctcgcagaggacgatctctttgggggctggtgaccggcaggtcatccagactccactggccgactcgctgcccgtcagccgctgcagcgtggccctgctcttccgccagctaggcatcaccaacgtgctgtctttgttctgtgccgccctcacggagcacaaggttctcttcctgtcccggagctaccagcggctcgccgatgcctgtaggggcctcctggcactgctgtttcctctcagatacagcttcacctatgtgcccatcctgccggctcagctgctggaggtcctcagcacacccacgcccttcatcattggggtcaacgcggccttccaggcagagacccaggagctgctcgatgtgattgttgctgatctggatggagggacggtcaccattcctgagtgtgtgcacattccacccttgccagagccactgcagagtcagacgcacagtgtgctgagcatggtcctggacccggagctggagttggctgacctcgccttccctccgcccacgacatccacctcctccctgaagatgcaggacaaggagctgcgcgcggtcttcctgcggctgttcgctcagctgctgcagggctatcgctggtgcctgcacgtcgtgcgcatccacccggagcctgtcatccgcttccataaggcagccttcctgggccagcgtgggctggtagaggacgatttcctgatgaaggtgctggagggcatggcctttgctggctttgtgtcagagcgtggggtcccataccgccctacggacctgttcgatgagctggtggcccacgaggtggcaaggatgcgggcggatgagaaccacccccagcgtgtcctgcgtcacgtccaggaactggcagagcagctctacaagaacgagaacccgtacccagccgtggcgatgcacaaggtacagaggcccggtgagagcagccacctgcgacgggtgccccgacccttcccccggctggatgagggcaccgtgcagtggatcgtggaccaggctgcagccaagatgcagggtgcacccccagctgtgaaggccgagaggaggaccaccgtgccctcagggccccccatgactgccatactggagcggtgcagtgggctgcatgtcaacagcgcccggcggctggaggttgtgcgcaactgcatctcctacgtgtttgaggggaaaatgcttgaggccaagaagctgctcccagccgtgttgagggccctgaaggggcgagctgcccgccgctgcctcgcccaggagctgcacctgcatgtgcagcagaaccgtgcggtcctggaccaccagcagtttgactttgtcgtccgtatgatgaactgctgcctgcaggactgcacttctctggacgagcatggcattgcggcggctctgctgcctctggtcacagccttctgccggaagctgagcccgggggtgacgcagtttgcatacagctgtgtgcaggagcacgtggtgtggagcacgccacagttctgggaggccatgttctatggggatgtgcagactcacatccgggccctctacctggagcccacggaggacctggcccccgcccaggaggttggggaggcaccttcccaggaggacgagcgctctgccctagacgtggcttctgagcagcggcgcttgtggccaactctgagtcgtgagaagcagcaggagctggtgcagaaggaggagagcacggtgttcagccaggccatccactatgccaaccgcatgagctacctcctcctgcccctggacagcagcaagagccgcctacttcgggagcgtgccgggctgggcgacctggagagcgccagcaacagcctggtcaccaacagcatggctggcagtgtggccgagagctatgacacggagagcggcttcgaggatgcagagacctgcgacgtagctggggctgtggtccgcttcatcaaccgctttgtggacaaggtctgcacggagagtggggtcaccagcgaccacctcaaggggctgcatgtcatggtgccagacattgtccagatgcacatcgagaccctggaggccgtgcagcgggagagccggaggctgccgcccatccagaagcccaagctgctgcggccgcgcctgctgccgggtgaggagtgtgtgctggacggcctgcgcgtctacctgctgccggatgggcgtgaggagggcgcggggggcagtgctgggggaccagcattgctcccagctgagggcgccgtcttcctcaccacgtaccgggtcatcttcacggggatgcccacggaccccctggttggggagcaggtggtggtccgctccttcccggtggctgcgctgaccaaggagaagcgcatcagcgtccagacccctgtggaccagctcctgcaggacgggctccagctgcgctcctgcacattccagctgctgaaaatggcctttgacgaggaggtggggtctgacagcgccgagctcttccgtaagcagctgcataagctgcggtacccgccggacatcagggccacctttgcgttcaccttgggctctgcccacacacctggccggccaccgcgagtcaccaaggacaagggtccttccctcagaaccctgtcccggaacctggtcaagaacgccaagaagaccatcgggcggcagcatgtcactcgcaagaagtacaacccccccagctgggagcaccggggccagccgccccctgaggaccaggaggacgagatctcagtgtcggaggagctggagcccagcacgctgaccccgtcctcagccctgaagccctccgaccgcatgaccatgagcagcctggtggaaagggcttgctgtcgcgactaccagcgcctcggtctgggcaccctgagcagcagcctgagccgggccaagtctgagcccttccgcatttctccggtcaaccgcatgtatgccatctgccgcagctacccagggctgctgatcgtgccccagagtgtccaggacaacgccctgcagcgcgtgtcccgctgctaccgccagaaccgcttccccgtggtctgctggcgcagcgggcggtccaaggcggtgctgctgcgctctggaggcctgcatggcaaaggtgtcgtcggcctcttcaaggcccagaacgcaccttctccaggccagtcccaggcggactcgagtagcctggagcaggagaagtacctgcaggctgtggtcagctccatgccccgctacgccgacgcgtcgggacgcaacacgcttagcggcttctcctcagcccacatgggcagtcacggtaagtggggcagtgtccggaccagtggacgcagcagtggccttggcaccgatgtgggctcccggctagctggcagagacgcgctggccccaccccaggccaacgggggccctcccgacccgggcttcctgcgtccgcagcgagcagccctctatatccttggggacaaagcccagctcaagggtgtgcggtcagaccccctgcagcagtgggagctggtgcccattgaggtattcgaggcacggcaggtgaaggctagcttcaagaagctgctgaaagcatgtgtcccaggctgccccgctgctgagcccagcccagcctccttcctgcgctcactggaggactcagagtggctgatccagatccacaagctgctgcaggtgtctgtgctggtggtggagctcctggattcaggctcctccgtgctggtgggcctggaggatggctgggacatcaccacccaggtggtatccttggtgcagctgctctcagaccccttctaccgcacgctggagggctttcgcctgctggtggagaaggagtggctgtccttcggccatcgcttcagccaccgtggagctcacaccctggccgggcagagcagcggcttcacacccgtcttcctgcagttcctggactgcgtacaccaggtccacctgcagttccccatggagtttgagttcagccagttctacctcaagttcctcggctaccaccatgtgtcccgccgtttccggaccttcctgctcgactctgactatgagcgcattgagctggggctgctgtatgaggagaagggggaacgcaggggccaggtgccgtgcaggtctgtgtgggagtatgtggaccggctgagcaagaggacgcctgtgttccacaattacatgtatgcgcccgaggacgcagaggtcctgcggccctacagcaacgtgtccaacctgaaggtgtgggacttctacactgaggagacgctggccgagggccctccctatgactgggaactggcccaggggccccctgaacccccagaggaagaacggtctgatggaggcgctccccagagcaggcgccgcgtggtgtggccctgttacgacagctgcccgcgggcccagcctgacgccatctcacgcctgctggaggagctgcagaggctggagacagagttgggccaacccgctgagcgctggaaggacacctgggaccgggtgaaggctgcacagcgcctcgagggccggccagacggccgtggcacccctagctccctccttgtgtccaccgcaccccaccaccgtcgctcgctgggtgtgtacctgcaggaggggcccgtgggctccaccctgagcctcagcctggacagcgaccagagtagtggctcaaccacatccggctcccgtcaggctgcccgccgcagcaccagcaccctgtacagccagttccagacagcagagagtgagaacaggtcctacgagggcactctgtacaagaagggggccttcatgaagccttggaaggcccgctggttcgtgctggacaagaccaagcaccagctgcgctactacgaccaccgtgtggacacagagtgcaagggtgtcatcgacttggcggaggtggaggctgtggcacctggcacgcccactatgggtgcccctaagactgtggacgagaaggccttctttgacgtgaagacaacgcgtcgcgtttacaacttctgtgcccaggacgtgccctcggcccagcagtgggtggaccggatccagagctgcctgtcggacgcctgagcctcccagccctgcccggctgctctgcttccggtcgttaccgaccactaggggtgggcagggccgccccggccatgtttacagccccggccctcgacagtattgaggccccgagcccccagcacttgtgtgtacagcccccgtccccgccccgccccgcccggccggccctaacttattttggcgtcacagctgagcaccgtgccgggaggtggccaaggtacagcccgcaatgggcctgtaaatagtccggccccgtcagcgtgtgctggtccagccagcggctgcaggcgagtttctagaaccagagtctatataaagagagaactaacgccaaaaaaaaaa

SEQ ID NO: 94 - DNA, 2629 bp, Homo sapiens
  mRNA (1)..(2629): gi|8400737|ref|NM_000546.2| Homo sapiens tumor protein p53 (Li-Fraumeni syndrome) (TP53)
acttgtcatggcgactgtccagctttgtgccaggagcctcgcaggggttgatgggattggggttttcccctcccatgtgctcaagactggcgctaaaagttttgagcttctcaaaagtctagagccaccgtccagggagcaggtagctgctgggctccggggacactttgcgttcgggctgggagcgtgctttccacgacggtgacacgcttccctggattggcagccagactgccttccgggtcactgccatggaggagccgcagtcagatcctagcgtcgagccccctctgagtcaggaaacattttcagacctatggaaactacttcctgaaaacaacgttctgtcccccttgccgtcccaagcaatggatgatttgatgctgtccccggacgatattgaacaatggttcactgaagacccaggtccagatgaagctcccagaatgccagaggctgctccccgcgtggcccctgcaccagcagctcctacaccggcggcccctgcaccagccccctcctggcccctgtcatcttctgtcccttcccagaaaacctaccagggcagctacggtttccgtctgggcttcttgcattctgggacagccaagtctgtgacttgcacgtactcccctgccctcaacaagatgttttgccaactggccaagacctgccctgtgcagctgtgggttgattccacacccccgcccggcacccgcgtccgcgccatggccatctacaagcagtcacagcacatgacggaggttgtgaggcgctgcccccaccatgagcgctgctcagatagcgatggtctggcccctcctcagcatcttatccgagtggaaggaaatttgcgtgtggagtatttggatgacagaaacacttttcgacatagtgtggtggtgccctatgagccgcctgaggttggctctgactgtaccaccatccactacaactacatgtgtaacagttcctgcatgggcggcatgaaccggaggcccatcctcaccatcatcacactggaagactccagtggtaatctactgggacggaacagctttgaggtgcgtgtttgtgcctgtcctgggagagaccggcgcacagaggaagagaatctccgcaagaaaggggagcctcaccacgagctgcccccagggagcactaagcgagcactgcccaacaacaccagctcctctccccagccaaagaagaaaccactggatggagaatatttcacccttcagatccgtgggcgtgagcgcttcgagatgttccgagagctgaatgaggccttggaactcaaggatgcccaggctgggaaggagccaggggggagcagggctcactccagccacctgaagtccaaaaagggtcagtctacctcccgccataaaaaactcatgttcaagacagaagggcctgactcagactgacattctccacttcttgttccccactgacagcctcccacccccatctctccctcccctgccattttgggttttgggtctttgaacccttgcttgcaataggtgtgcgtcagaagcacccaggacttccatttgctttgtcccggggctccactgaacaagttggcctgcactggtgttttgttgtggggaggaggatggggagtaggacataccagcttagattttaaggtttttactgtgagggatgtttgggagatgtaagaaatgttcttgcagttaagggttagtttacaatcagccacattctaggtaggtaggggcccacttcaccgtactaaccagggaagctgtccctcatgttgaattttctctaacttcaaggcccatatctgtgaaatgctggcatttgcacctacctcacagagtgcattgtgagggttaatgaaataatgtacatctggccttgaaaccaccttttattacatggggtctaaaacttgacccccttgagggtgcctgttccctctccctctccctgttggctggtgggttggtagtttctacagttgggcagctggttaggtagagggagttgtcaagtcttgctggcccagccaaaccctgtctgacaacctcttggtcgaccttagtacctaaaaggaaatctcaccccatcccacaccctggaggatttcatctcttgtatatgatgatctggatccaccaagacttgttttatgctcagggtcaatttcttttttcttttttttttttttttttctttttctttgagactgggtctcgctttgttgcccaggctggagtggagtggcgtgatcttggcttactgcagcctttgcctccccggctcgagcagtcctgcctcagcctccggagtagctgggaccacaggttcatgccaccatggccagccaacttttgcatgttttgtagagatggggtctcacagtgttgcccaggctggtctcaaactcctgggctcaggcgatccacctgtctcagcctcccagagtgctgggattacaattgtgagccaccacgtggagctggaagggtcaacatcttttacattctgcaagcacatctgcattttcaccccacccttcccctccttctccctttttatatcccatttttatatcgatctcttattttacaataaaactttgctgcca

SEQ ID NO: 95 - DNA, 3398 bp, Homo sapiens
  mRNA (1)..(3398): gi|12025669|ref|NM_001102.2| Homo sapiens actinin, alpha 1 (ACTN1)
cgctgtcgccgccagtagcagccttcgccagcagcgccgcggcggaaccgggcgcaggggagcgagcccggccccgccagcccagcccagcccagccctactccctccccacgccagggcagcagccgttgctcagagagaaggtggaggaagaaatccagaccctagcacgcgcgcaccatcatggaccattatgattctcagcaaaccaacgattacatgcagccagaagaggactgggaccgggacctgctcctggacccggcctgggagaagcagcagagaaagacattcacggcatggtgtaactcccacctccggaaggcggggacacagatcgagaacatcgaagaggacttccgggatggcctgaagctcatgctgctgctggaggtcatctcaggtgaacgcttggccaagccagagcgaggcaagatgagagtgcacaagatctccaacgtcaacaaggccctggatttcatagccagcaaaggcgtcaaactggtgtccatcggagccgaagaaatcgtggatgggaatgtgaagatgaccctgggcatgatctggaccatcatcctgcgctttgccatccaggacatctccgtggaagagacttcagccaaggaagggctgctcctgtggtgtcagagaaagacagccccttacaaaaatgtcaacatccagaacttccacataagctggaaggatggcctcggcttctgtgctttgatccaccgacaccggcccgagctgattgactacgggaagctgcggaaggatgatccactcacaaatctgaatacggcttttgacgtggcagagaagtacctggacatccccaagatgctggatgccgaagacatcgttggaactgcccgaccggatgagaaagccatcatgacttacgtgtctagcttctaccacgccttctctggagcccagaaggcggagacagcagccaatcgcatctgcaaggtgttggccgtcaaccaggagaacgagcagcttatggaagactacgagaagctggccagtgatctgttggagtggatccgccgcacaatcccgtggctggagaaccgggtgcccgagaacaccatgcatgccatgcaacagaagctggaggacttccgggactaccggcgcctgcacaagccgcccaaggtgcaggagaagtgccagctggagatcaacttcaacacgctgcagaccaagctgcggctcagcaaccggcctgccttcatgccctctgagggcaggatggtctcggacatcaacaatgcctggggctgcctggagcaggtggagaagggctatgaggagtggttgctgaatgagatccggaggctggagcgactggaccacctggcagagaagttccggcagaaggcctccatccacgaggcctggactgacggcaaagaggccatgctgcgacagaaggactatgagaccgccaccctctcggagatcaaggccctgctcaagaagcatgaggccttcgagagtgacctggctgcccaccaggaccgtgtggagcagattgccgccatcgcacaggagctcaatgagctggactattatgactcacccagtgtcaacgcccgttgccaaaagatctgtgaccagtgggacaatctgggggccctaactcagaagcgaagggaagctctggagcggaccgagaaactgctggagaccattgaccagctgtacttggagtatgccaagcgggctgcacccttcaacaactggatggagggggccatggaggacctgcaggacaccttcattgtgcacaccattgaggagatccagggactgaccacagcccatgagcagttcaaggccaccctccctgatgccgacaaggagcgcctggccatcctgggcatccacaatgaggtgtccaagattgtccagacctaccacgtcaatatggcgggcaccaacccctacacaaccatcacgcctcaggagatcaatggcaaatgggaccacgtgcggcagctggtgcctcggagggaccaagctctgacggaggagcatgcccgacagcagcacaatgagaggctacgcaagcagtttggagcccaggccaatgtcatcgggccctggatccagaccaagatggaggagatcgggaggatctccattgagatgcatgggaccctggaggaccagctcagccacctgcggcagtatgagaagagcatcgtcaactacaagccaaagattgatcagctggagggcgaccaccagctcatccaggaggcgctcatcttcgacaacaagcacaccaactacaccatggagcacatccgtgtgggctgggagcagctgctcaccaccatcgccaggaccatcaatgaggtagagaaccagatcctgacccgggatgccaagggcatcagccaggagcagatgaatgagttccgggcctccttcaaccactttgaccgggatcactccggcacactgggtcccgaggagttcaaagcctgcctcatcagcttgggttatgatattggcaacgacccccagggagaagcagaatttgcccgcatcatgagcattgtggaccccaaccgcctgggggtagtgacattccaggccttcattgacttcatgtcccgcgagacagccgacacagatacagcagaccaagtcatggcttccttcaagatcctggctggggacaagaactacattaccatggacgagctgcgccgcgagctgccacccgaccaggctgagtactgcatcgcgcggatggccccctacaccggccccgactccgtgccaggtgctctggactacatgtccttctccacggcgctgtacggcgagagtgacctctaatccaccccgcccggccgccctcgtcttgtgcgccgtgccctgccttgcacctccgccgtcgcccatctcctgcctgggttcggtttcagctcccagcctccacccgggtgagctggggcccacgtggcatcgatcctccctgcccgcgaagtgacagtttacaaaattattttctgcaaaaaagaaaaaaaagttacgttaaaaaccaaaaaactacatattttattatagaaaaagtattttttctccaccagacaaatggaaaaaaagaggaaagattaactatttgcaccgaaatgtcttgttttgttgcgacataggaaaataaccaagcacaaagttatattccatcctttttactgatttttttttcttctatctgttccatctgctgtattcatttctccaatctcatgtccattttggtgtgggagtcggggtagggggtactcttgtcaaaaggcacattggtgcgtgtgtgtttgctagctcacttgtccatgaaaatattttatgatattaaagaaaatcttttg

SEQ ID NO: 96 - DNA, 9142 bp, Homo sapiens
  mRNA (1)..(9142): gi|66279525|ref|NM_001458.2| Homo sapiens filamin C, gamma (actin binding protein 280) (FLNC)
ccctggagggagagagagccagagagcggccgagcgcctaggaggcccgccgagcctcgccgagccccgccagccccggcgcgagagaagttggagaggagagcagcgcagcgcagcgagtcccgtggtcgcgccccaacagcgcccgacagcccccgatagcccaaaccgcggccctagccccggccgcacccccagcccgcgccagcatgatgaacaacagcggctactcagacgccggcctcggcctgggcgatgagacagacgagatgccgtccacggagaaggacctggcggaggacgcgccgtggaagaagatccagcagaacacattcacgcgctggtgcaatgagcacctcaagtgcgtgggcaagcgcctgaccgacctgcagcgcgacctcagcgacgggctccggctcatcgcgctgctcgaggtgctcagccagaagcgcatgtaccgcaagttccatccgcgccccaacttccgccaaatgaagctggagaacgtgtccgtggccctcgagttcctcgagcgcgagcacatcaagctcgtgtccatagacagcaaggccatcgtggatgggaacctgaagctgatcctgggcctgatctggacgctgatcctgcactactccatctccatgcccatgtgggaggatgaagatgatgaggatgcccgcaaacagacgcccaagcagcggctgcttggctggatccagaacaaggtgccccagctgcccatcaccaacttcaaccgtgactggcaggacggcaaagctctgggcgccctggtggacaactgcgcccccggtctctgccccgactgggaggcctgggaccccaaccagcccgtggagaacgcccgggaggccatgcagcaggccgacgactggcttggggtgccccaggtcattgcccctgaggagattgtggaccccaacgtggatgagcattctgttatgacctacctgtcccagttccccaaggccaagctcaaacctggtgcccctgttcgatccaagcagctgaaccccaagaaagccatcgcctatgggcctggcatcgagccacagggcaacaccgtgctgcagcctgcccacttcaccgtgcagacggtggacgcgggcgtgggcgaggtgctggtctacatcgaggaccctgaaggccacaccgaggaggctaaggtggttcccaacaatgacaaggatcgcacctatgctgtctcctatgtgcccaaggtcgctgggttacacaaggtgaccgtgctctttgctggccagaacattgaacgcagtccctttgaggtgaacgtgggcatggccctgggagatgccaacaaggtgtcagcccgtggccctggcctggaacctgtgggcaatgtggccaacaaacccacctactttgacatctacactgcgggggccggcactggcgatgttgctgtggtgatcgtggacccacagggccggcgggacacagtggaggtggccctggaggacaagggtgacagcacgttccgctgcacatacagacctgccatggaggggccacataccgtgcatgtggcctttgcgggtgcccccatcacccgcagtcccttccctgtccatgtgtcggaagcctgtaaccccaacgcctgccgcgcctctgggcgaggcctgcagcccaagggtgttcgcgtgaaagaggtggctgacttcaaggtgtttaccaagggtgccggcagcggggagctcaaggtcacggtcaaggggccaaagggcacagaggagccagtgaaggtgcgggaggctggggatggtgtgttcgagtgcgagtactacccggtggtgcctgggaagtatgtggtgaccatcacgtggggcggctacgccatccctcgcagcccctttgaggtacaggtgagcccagaggcaggagtgcaaaaggtccgggcctggggtcctggtttggagactggccaggtgggcaagtcagccgattttgtggtggaagccattggcaccgaggtggggacactgggcttctccatcgaggggccctcacaagccaagatcgaatgtgacgacaagggggatggctcctgcgatgtgcggtactggcccacggagcctggggagtacgctgtgcacgtcatctgtgacgatgaggacatccgagactcacccttcattgcccacatcctgcccgccccacctgactgcttcccagataaggtgaaggcctttgggcctggcctggagcctaccggctgcatcgtggacaagcccgctgagttcaccattgatgctcgtgcagctggcaagggagacctgaagctctatgcccaggacgccgacggctgtcccatcgacatcaaggtgatccccaacggcgacggcaccttccgctgctcctacgtgcccaccaagcccattaagcacaccatcatcatctcctggggaggcgtaaacgtgcccaagagccccttccgggtgaacgtgggcgagggcagccaccccgagcgggtaaaggtgtacggccccggagtggagaagacaggcctcaaggccaatgagcccacctacttcacggtggactgcagcgaggcggggcaaggcgacgtgagcatcggcatcaagtgcgccccaggcgtggtgggccctgcagaggctgacattgacttcgacatcatcaagaatgacaacgacaccttcaccgtcaagtacacgccaccaggggcgggccgctacaccatcatggtgctgtttgccaaccaggagatccccgccagccccttccacatcaaggtggacccatcccacgatgccagcaaagtcaaggccgagggccctgggctgaatcgcacaggtgtggaagtcgggaagcccacccacttcacggtgctgaccaagggagccggcaaggccaagctggatgtgcagtttgcagggacagccaagggcgaggttgtgcgggactttgagatcatagacaaccatgactactcctacactgtcaagtacaccgctgtccagcagggcaacatggcagtgacagtgacttatggcggggaccctgtccccaagagcccctttgtggtgaatgtggcacccccgctggacctcagcaaaatcaaagttcagggccttaatagcaaggtggctgtgggacaggaacaagcattctctgtgaacacacgaggggctggcggtcagggccaactggatgtgcggatgacttcgccctctcgccggcccatcccctgcaagctggagccaggcggtggagcggaagcccaggctgtgcgctacatgcccccggaggaggggccctacaaggtggatatcacctacgatggtcacccggtgcctggcagcccgtttgctgtggagggtgtcctgccccctgatccctccaaggtctgtgcttatggcccgggtctcaagggtggactggtaggcacccccgcgccattctccatcgacaccaagggggctggcacaggtggcctggggctgaccgtagagggcccctgcgaggccaagatcgagtgccaggacaatggtgatggctcatgtgctgtcagctacctgcccacggagcctggcgagtacaccatcaacatcctgtttgctgaggcccacatccctggctcgcccttcaaagccaccattcggcctgtgtttgacccgagcaaggtgcgggccagtggaccgggcctggagcgcggcaaggtcggtgaggcagccaccttcactgtggactgctcagaggcaggcgaggcggagctgaccattgagatcctgtcggatgccggggtcaaggccgaggtgctgatccacaacaacgcggatggcacctaccacatcacctacagccctgccttccctggcacctacaccattaccatcaagtatggcgggcatcccgtgcccaaattccccacccgtgtccatgtgcagcctgcggtcgataccagtggcgtcaaggtctcagggcctggtgttgagccacacggtgtcctgcgggaggtgaccactgagttcactgtggatgcaagatccctaacagccacaggcggcaaccacgtgacggctcgtgtgctcaacccctcgggggccaagacagacacctatgtgacagacaatggggacggcacctaccgagtgcagtacaccgcctacgaggagggcgtgcatctggtggaggtcctgtatgatgaggtcgctgtgcccaagagccccttccgagtgggcgtgaccgagggctgtgatcccacccgcgtccgagccttcgggccaggcctggagggtggcttggtcaacaaggccaaccgattcactgtggagaccaggggagcgggcaccgggggccttggcctagccatcgagggtccctcggaagccaagatgtcctgcaaggacaacaaggatggtagctgcaccgtggagtacatccccttcactcctggagactatgacgtcaacatcaccttcggggggcggcccatcccagggagcccgttccgcgtgccagtgaaggatgtggtggaccctgggaaggtgaagtgctcagggccagggctgggggctggtgtcagggcccgggttcctcagaccttcacagtggactgcagtcaagctggccgggcgcccctgcaggtggctgtgctgggccccacaggtgtggccgagcctgtggaggtgcgggacaatggagatggcacccacactgtccactacaccccagccactgacgggccctacacggtagccgtcaagtatgctgaccaggaggtgccacgcagccccttcaagatcaaggtcctcccagctcatgatgccagcaaggtgcgggccagcggcccaggcctcaacgcctctggcatccctgccagcctgcctgtggagttcaccatcgacgcacgggacgcgggcgaggggttgctcactgtccagatcttggaccccgagggtaagcccaagaaggccaacatccgggacaatggggatggcacgtacactgtgtcctacctgccggacatgagtggccggtacaccatcaccatcaagtatggcggtgatgagatcccctactcgcccttccgcatccatgctctgcccactggggatgccagcaagtgcctcgtcacagtgtccattggaggccatggcctgggtgcctgcctgggccctcgaatccagattgggcaggagacggtgatcacggtggatgccaaggcagccggtgaggggaaggtgacatgcacggtgtccacgccggatggggcagagctcgatgtggatgtggttgagaaccatgacggtacctttgacatctactacacagcgcccgagccgggcaagtacgtcatcaccatccgcttcgggggtgagcacatccccaacagccccttccacgtgctggcgtgtgaccccctgccgcacgaggaggagccctctgaagtgccacagctgcgccagccctacgctcctccccggcccggcgcccgccccacacactgggccacagaggagccagtggtgcctgtggagccaatggagtccatgctgaggcccttcaacctggtcatccccttcgcggtgcagaaaggggagctcacaggagaggtgcggatgccctcggggaagacggcacggcccaacatcaccgacaacaaggacggcaccatcacggtgaggtatgcacccactgagaaaggcctgcaccagatggggatcaagtatgacggcaaccacatccctgggagccccttacagttctatgtggatgccatcaacagccgccatgtcagtgcctatgggccaggcctgagccatggcatggtcaacaagccagccaccttcactattgtcaccaaagatgctggagaagggggtctgtcactggccgtggagggcccatccaaggcagagatcacctgtaaggacaacaaggatggcacctgcaccgtgtcctatctgccgactgcgcctggagactacagcatcatcgtgcgcttcgatgacaagcacatcccggggagccccttcacagccaagatcacaggtgatgactccatgaggacctcacagctgaatgtgggcacctccacggacgtgtcactgaagatcaccgagagtgatctgagccagctgaccgccagcatccgtgccccctcgggcaacgaggagccctgcctgctgaagcgcctgcccaaccggcacattgggatctccttcacccccaaggaggtcggggagcacgtggtgagcgtgcgcaagagtggcaagcatgtcaccaacagccccttcaagatcctggtggggccatctgagatcggggacgccagcaaggtgcgggtctggggcaaggggctttccgagggacacacattccaggtggcagagttcatcgtggacactcgcaatgcaggttatgggggcttggggctgagtattgaaggcccaagcaaggtggacatcaactgtgaggacatggaggacgggacatgcaaagtcacctactgccccaccgagcccggcacctacatcatcaacatcaagtttgctgacaagcacgtgcctggaagccccttcactgtgaaggtgaccggcgagggccgcatgaaggagagcatcacccggcggagacaggcaccttccatcgccaccatcggcagcacctgtgacctcaacctcaagatcccaggaaactggttccagatggtgtctgcccaggagcgcctgacacgcaccttcacacgcagcagccacacctacacccgcacggagcgcacggagatcagcaagacgcggggcggggagacaaagcgcgaggtgcgggtggaggagtccacccaggtcggcggggaccccttccctgctgtgtttggggacttcctgggccgggagcgcctgggatccttcggcagcatcacccggcagcaggagggtgaggccagctctcaggacatgactgcacaggtgaccagcccatcgggcaaggtggaagccgcagagatcgtcgagggcgaggacagcgcctacagcgtgcgctttgtgccccaggaaatggggccccatacggtcgctgtcaagtaccgtggccagcacgtgcccggcagcccctttcagttcactgtggggccgctgggtgaaggtggtgcccacaaggtgcgggccggaggcacagggctggagcgaggtgtggccggcgtgccagccgagttcagcatctggacccgggaggctggcgctgggggcctgtccattgctgtggagggtcctagcaaagcggagattgcatttgaggatcgcaaagatggctcctgcggcgtctcctatgtcgtccaggaaccaggtgactatgaggtctccatcaagttcaatgatgagcacatcccagacagcccctttgtggtgcctgtggcctccctctcggatgacgctcgccgtctcactgtcaccagcctccaggagacggggctcaaggtgaaccagccagcgtcctttgccgtgcagctgaacggtgcccggggcgtgattgatgcccgggtgcacacaccctcgggggctgtggaggagtgctacgtctctgagctggacagtgacaagcacaccatccgcttcatcccccacgagaatggcgtccactccatcgatgtcaagttcaacggtgcccacatccctggaagtcccttcaagatccgcgttggggagcagagccaggctggggacccaggcttggtgtcagcctacggtcctgggctcgagggaggcactaccggtgtgtcatcagagttcatcgtgaacaccctgaatgccggctcgggggccttgtctgtcaccattgatggcccctccaaggtgcagctggactgtcgggagtgtcctgagggccatgtggtcacttatactcccatggcccctggcaactacctcattgccatcaagtacggtggcccccagcacatcgtgggcagccccttcaaggccaaggtcactggtccgaggctgtccggaggccacagccttcacgaaacatccacggttctggtggagactgtgaccaagtcctcctcaagccggggctccagctacagctccatccccaagttctcctcagatgccagcaaggtggtgactcggggccctgggctgtcccaggccttcgtgggccagaagaactccttcaccgtggactgcagcaaagcaggcaccaacatgatgatggtgggcgtgcacggccccaagaccccctgtgaggaggtgtacgtgaagcacatggggaaccgggtgtacaatgtcacctacactgtcaaggagaaaggggactacatcctcattgtcaagtggggtgacgaaagtgtccctggaagccccttcaaagtcaaggtcccttgaatcccaaaagtgcctccccagcctcagcccccacctccagccacacacacattacacacacacacacacacacacaaatgtgccacacccagacacgcacagaatcagacactacaaacacctgccttgggggtgaagtgaaggcccagcctccccaccccaccgcgccccaggggttggaggaccttgtctgtgtcaggacagtgtccctccctgggaatgtgacatgagggccgactggggccaggctcaggggcagaggctgggacacaaggggctggcgagggctgcgaggccagggaagccctgagtttctggcggggctgagcagtgggggagcattgtgttgtgggtgtctgtgtgtgaggtcaccctcaaactgcaccgccggccagataccctcctgaccccgaggacttggtctggtctctctggtggctacaaccccagagttttaaggacttggaaaggaaagcacaatcagagaagaaaacagcccccgaaccagcaggagtggcctggcacatggaccggcctgagcgatgtgcactccacccaagccaggctcccagggggcctgatttctctctcactgtctctttttttaaaatggttgcacggctctgccccatggggggccttttttacacactgcgaggcccagctttctaggggacttttgcacatgtcatgcagctcagctgggagctgcttaggtggaaaactccaaataaagtgcggctgtcgcagagggt

SEQ ID NO: 97 - DNA, 6014 bp, Homo sapiens
  mRNA (1)..(6014): gi|26051277|ref|NM_172020.1| Homo sapiens POM121 membrane glycoprotein (rat) (POM121)
cgcttcctgcgcctcttcaggtcaccgcttgctctagttcccaggctttggcctctagtggatgagaatcaccgagtctgcggggctggacgctgaccgcccgggccagcacctaggcgggcgggagctgtgcggcccagggttcgcgcgggccgggtagaggctcgagccgggacccccgagcgtgaaccccggagccagcggcgctggggccagaggggccaggcgggaggtggtggcggaggcgaaggggcgacgggacctgggcctggcccgtgtgtgtcctcggcggcctggcgccggccgtcgctgtacggtgagccccagggaggcggatctgggccccgagaaggacacccgcctggatttgccccgtaggcccggcccgggcccctcgggagcagaacagccttggtgaggtggacaggaggggacttcgcgagcagacgcgcgcgccagcgacagcagcccgccccggcctctcgggagccgtggggcagaggctgcagagccccaggagggggccagtgtcattcaaagatgtggctgtggatttcacccaggaggagtggtggcaactggaccctgatgagaagataacatacggggatgtgatgttggagaactacagccatctagtttccctggcttatgaggtggcaacatcttgtacttcggagatctgaagccgagcaacttgcccaagtccttcttcttttcccattaacaagatatgatatcaccaagccaaacgtcatcattaagttggagcagggagaggagctgtggataacgggaggtgaatttccatgtcaacatagtccagggattgtgggactttaccaaatcggtttgtaataacacctagaagacgctatccgatccatcaggcccagtattcctgtctgggggtacttcccaccgtgtgctggaatggttatcacaagaaggctgtgctgtcccctcgcaactccaggatggtgtgtagcccagtgactgtgaggatcgcccctcctgacagaagattttcgcgttctgcgataccagagcagataatcagctcaacactgtcctcaccatcaagtaacgccccagacccatgtgcaaaggagacagtactgagtgccctcaaagagaaggagaagaaaaggacagtggaggaagaagaccaaatattccttgatggccaggaaaataaaagaaggcgccatgatagcagtggcagtggacattcagcatttgagcccctggtggccaatggagtccccgcttcttttgtgcctaagcctgggtctctgaagagaggcctcaattctcagagctcagatgaccacttgaataagagatcccgaagctcttccatgagctccttgacaggcgcttacgcaagtggcatccctagctccagccgcaatgccattaccagttcctacagctccactcgaggcatctcacagctctggaagagaaatggccccagttcatcacccttctctagcccagcctcctcccgctcccagacaccggagaggccagcaaagaaaataagagaagaggagctgtgtcatcattccagttcttcaactccattggcagcagacagggagtcccagggagaaaaggctgcagatacaaccccaaggaagaaacaaaactcgaattctcagtctacacctggcagctctgggcagcgtaagcggaaagttcagctgctgccttctcggcgaggggaacagctgaccttgcctccacctccccagcttggctattcgatcactgccgaggacctagacttagagaagaaggcttcattacagtggttcaaccaggccttggaggacaagagcgatgctgcctcgaactctgtcactgagaccccacctatcactcagccttcatttacctttaccctgcctgctgctgcacctgcctccccacccacctccctcctggccccaagcaccaacccactgttagagagcttgaagaagatgcagactcccccgagcctgccaccctgcccagaatctgctggagcagcaaccactgaggccctctcacctccaaagacacccagcctcctacccccgctgggtttatcacagtcagggccgccagggctgctccccagcccctcctttgactccaaacccccgaccactttgctggggctgatccctgctccatccatggtaccagccactgacaccaaggcacctccaacccttcaggcagagacggctaccaaaccccaagccacatctgccccgtcccccgcccccaagcaaagcttcctgtttggaacacagaacacctcaccttccagccctgccgcccctgctgcatcttcagcacctcccatgttcaagcccattttcacggctccacccaagagtgagaaggaaggccccacaccgcctggcccttcagtcacagccacagcgccctccagctcctccctccccacgaccaccagcaccacagccccgaccttccagcctgtctttagcagcatggggccacctgcatctgtgcccttgcctgctcccttcttcaagcagacaactactcccgccactgctcccaccacaactgccccgctcttcactggcctggccagcgccacctctgctgtggctcccatcacctctgccagtccatccacagactctgcttcgaagcctgcgtttggctttggcataaacagtgtgagcagcagcagtgtgagtaccacgaccagcaccgccactgccgcctcacagcctttcctcttcggggcgccccaggcctctgctgccagcttcaccccggccatgggctccatattccagtttggcaaacctcctgccttgcccacaaccaccacagtcaccaccttcagccagtccctgcacactgccgtgccaacggccaccagcagcagcgctgccgactttagtggttttggcagcaccctcgccacctccgccccggccaccagcagccagcccactctgacgttcagtaacacgagcacccccacgttcaacattccctttggctcaagcgccaagtccccgctcccatcatatccgggagccaacccccagcccgcatttggggccgctgaggggcagccaccgggggccgccaagccggcccttgcccccagctttggcagctctttcacttttggaaactctgcagccccggctgctgcacccacacctgcacctccgtccatgatcaaggtcgtgcctgcgtacgtgcctacgcccatccatcctatctttggcggtgccacgcactcggcgtttgggttgaaagccacggcttcggccttcggcgctcccgccagctcacagcccgcctttggcggctccactgctgtcttcttcggtgcagccaccagctccggctttggagccaccacccagaccgccagcagcgggagcagcagctcggtgtttggcagcacaacaccatcacccttcacgtttgggggttcggcagcccccgctggcagtgggagctttgggatcaatgtggccaccccaggctccagcaccaccaccggagctttcagctttggagcaggacagagtgggagcacagccacctccacccccttcgcagggggcttaggtcagaacgccctgggcaccaccggccagagcacaccgtttgccttcaacgtgagcagcacaactgagagcaaacctgtgtttggaggcaccgccacccccacctttggtctgaacacccctgcgcctggagtgggcacatcaggcagcagcctctcctttggggcatcctcagcacccgcccaaggctttgttggtgttgcacctttcggatcggcggccctttcattttccattggtgcgggatccaagaccccaggggctcgacagcgactgcaggcccgaaggcagcacacccgcaaaaagtagcctttgtcccctgtccctgttccccccaccccttccctaaatctggaccttggcacctgctaggaagagccttggacccttccagttgcgtaaagcaaacctaccccggatctctggcttcagccgccagggggcagtggcagccctggggccctttcccttctggaggaagcacaagcctcagggaaggggaagcaggatgcggagggccaaagcccgggacctctacttgaacagttctactggggaggctggagaactaaggaaacacctgtacatagtgtccgctgccctgactcccgcttagcacacccttaggcaggcgccccttccacctttccccgagaccgtcgtcgctggagggggcagggtccagcccgcctggatcggtggtgtgcacctgatgggatttgggaaatgggctatccgtaaagctttatcttgcttggcttagctgtgagaagtggttctcttcctctggtcccttctggggactctgtttccccatttcttgctgctgtgtccctcaccagttccttgcaggattccttcgtttttaaatgcccttgaatctagctttgccttggagaccccagtgggtgctgctcctgccgttttcttcctgccaagcctgaatcaatgtttcatctccaaccctctgccagtttggcccctcagagcttggtggctcaagactgttagcctggcagagccaggggtgaagggagaagctcttggagcaggcaggatgcccaccgctgcttcagctgcctcctcgcccagctaccctttggccccattgggccctcgtctgcctctccaggattgtatgtttcaagccttgtcctgtgttcctttgtctgacgctctgtgtattgctctttgaatcgagtttggaggaagagttgagttgtatgagtggcggcatgttggtagtgccggacttcctgtttcaagttttctggggcctcgctaattgaatgtggaaagtagcaccacttgacggctacaagtgccgactcctgaattttcccatggtgttctgacttcaagggctggcagccagggagaatgggcccaggggaagcaaagacctcttccctctgccgtttctgtcccacttaactgacctcactggaggctacatcacccaaagtagatgttagaaaacctaaattaatgaaccatatttttaaaatcctatttttcccaaacagggccctctgcagcccatcctttccttccgtccttctgaaaccacataccccaggcccaagcgccttgctgccacgcccaacctctttgggagaagtatgaatgcgtgtgtctaaattaaaagaaaaaaatatttaaacgttttttaacaaaaatttatttttgtatttaagctaaattgccttttaaattccttcaagcttggttcattgaggtggttaagtataaatgctattaactaggaattagctgtatagttaagttatgcctgtgcaaagaagaggctcaaatgctgtccccggcagctttcctgggggactagagctccttctggccatgttatatgaaatgtaattcttattttataaataatgtgatgtaaatgtaactggtgccccctccccgatgtgactgagggtgagtgagtggtggcggggctgctccttcccacccctcagaacagctctgatcctcgttaatacctggctgcgtgtgcagctgaggagggagtgaacctcaagcctaaatacctgttaggattggagggtctgggtgggcctgggcctagcaatcaagcttctacctgtaccttatgtaaggtagaccctcctagtgtcagtacctgagctagtttacctcagttccgcaggcaggacagccggtccgggaaccctgagtgagaatgagtgtggatgtgtacagtacacgcactggacggcagcgggaggctgggactttccattacaaatagagacttcattcctgttgagtctagttggaatttttagtatgaatgtgagatttttctcctgcttgtgacattaagaataaaaaactgtgatctatcgtaaaaaaaaaaaaaaaaaa

SEQ ID NO: 98 - DNA, 4606 bp, Homo sapiens
  mRNA (1)..(4606): gi|52486449|ref|NM_012416.2| Homo sapiens RAN binding protein 6 (RANBP6)
gacagagcgcaatggcggcaaccgcgtctgcaggggtgccggcgaccgtgtcagaaaagcaagagttttaccagcttctgaagaacctgatcaatccaagctgtatggtgcggaggcaagcagaggaaatctatgaaaatatcccaggtctgtgtaagactaccttcctcttagatgccgtcagaaatagaagagcaggttatgaggtgagacaaatggctgccgcactgctacgacggcttttgtcctctgggtttgaggaggtttatccaaatctgcctgctgatgttcagagagatgtcaagattgaactgattctggctgttaagttagaaacacatgctagcatgaggaaaaaactttgtgatatttttgcagtgctggccaggaatttgatagatgaggatggcactaaccactggccggaaggtctgaagtttcttattgattcaatctactccaaaaatgtggttctatgggaagttgcacttcacgttttctggcactttcctgggatttttgggacccaagagcggcatgatttggatatcatcaaacggttgttggaccagtgtattcaagatcaagaacatccagcaatcaggacattatccgctagagctgcagctgcatttgtacttgctaatgagaataatattgctcttttcaaagactttgcagacttgcttcctggaatcttacaggctgtgaatgactcatgctaccaggatgatgattcagtgctagaatcccttgttgagattgcagataccgtacctaagtacttgggtccttatttagaagatactctacagttgagtttgaagttatgtggagactctaggcttagtaatctgcagcgccagctggccctcgaagttatagtgaccttgtctgaaactgccactccgatgttgaaaaaacatacaaatattattgcacaggcagttcctcatatattagcaatgatggttgatctacaagatgatgaggactgggtaaatgctgatgaaatggaagaagatgattttgacagcaatgcagttgctgcggagagtgcactagacagactggcttgtgggcttggtggaaaagttgttttaccaatgaccaaggagcatatcatgcagatgcttcagagccctgactggaagtatcgacatgctggattaatggccttatctgccattggagaaggatgccatcaacaaatggaatcaattctagatgaaacagttaactccgttttgctttttcttcaggatcctcatccaagggtgagggctgcagcctgtactacacttggacagatggctacagattttgcacctaatttccaaaagaaatttcatgaaacagtgattgcagctctgttacgtaccatggaaaatcaaggtaatcagcgtgtgcaatcacatgcagcttctgctcttattatttttattgaagactgccctaaatcattgctagttctatatgtggatagtatggtgaaaaatctacattccgtcttggtgattaaacttcaagagttgattcggaatggaactaagttggctttggaacaacttgtgacaaccattgcatcagttgcagatacaatagaagaaaaatttgtcccatattatgatatattcatgccctcactaaagcacattgttgagcttgctgttcagaaggaactcaagcttctgagaggaaaaactatcgagtgcattagccatattggtcttgctgttgggaaggaaaaatttatgcaagatgcatcaaatgtgatgcagctgttgttgaagacacaatcagacttaaataatatggaagatgatgaccctcagacctcttacatggtttcagcatgggctagaatgtgtaaaattcttggaaaagattttcaacagtaccttccactggttatcgagcctcttattaagactgcttcagctaaacctgatgttgctctcttagacacacaggatgtggaaaatatgagtgacgatgatggctggcaatttgtaaatcttggagaccagcagagttttggaattaaaacttcaggacttgaagcaaaagcaactgcttgccaaatgttggtttactatgctaaggagttaagggaagggtttgtggaatatacagaacaagttgtgaagctgatggttcctttactgaaattttatttccatgacaatgttcgagtggcagcagcagagtccatgccttttctcctggaatgtgcaagaattcgtggcccagagtatcttgcacagatgtggcaattcatatgtgaccccttaatcaaggctattggtactgaaccagatacagatgtgctctcagaaataatgaattcttttgcaaagtccattgaagttatgggagatggttgccttaatgatgaacacttggaagaactgggaggaatactgaaagcaaaacttgaagggcactttaaaaaccaagaattgagacaggtgaaaagacaggaagaaaactatgatcaacaggttgagatgtctctgcaagatgaggatgaatgtgatgtttatattctgaccaaagtatcagatattttgcactcattatttagtacttataaggaaaagattttaccatggtttgaacaactacttccattaattgtaaatctaatttgttcaagtaggccatggccagacagacagtggggattgtgcatatttgatgacatcatagagcactgcagtccaacttcatttaaatatgtagaatattttcggtggccaatgctactaaatatgcgagataacaaccctgaagtcaggcaagctgctgcttatggcctgggtgtcatggcacagtttggtggagatgattatcgttctttatgttcagaagctgttccacttctggtaaaagttattaagtgtgcaaattccaaaaccaaaaaaaatgtcattgctacagagaactgtatctcagcaatagggaagattttgaagtttaagcctaactgtgtaaatgtagatgaagttcttccacactggttatcatggcttccactgcatgaagataaagaggaagctattcagactttgagttttctctgtgacctaattgaaagtaaccacccagttgtaattggtccaaataattccaatcttcccaaaataatcagtataattgcagaaggaaaaattaatgagactattaactatgaggatccttgtgccaaacgcctagctaatgtcgtgcgtcaggtacagacttctgaagatttatggttggaatgtgtatcacaacttgatgatgaacagcaggaagccttacaggagttgctaaattttgcttgaagcactttaatataacttgaatattatctattataaaagtaactacaaataagtgttgtgaatagattttattataaatcagagaactgttttctccctgctaagcagtttatagttcttctccatgtttctccagaattaatcagtgttagtcctctgtttatctcgcatgttttatcttccaaacacagaccttggtgataacctgtgcttcaaactgtcttaaacaatgtttgtcacctttcccctagttgatgtaaagtatataaattgttgctatttgtttgaactattattgatgctagccaagcagtatacttgatgtgaagatgtcatgctatcacaatatgctaagagctcacaaaaataagatagaatttccaggacaaacatctttggaattgtgagtgaaggatatagtggcaggcttgtccctctttaattaatactcttggtatttgtggtgatgggaggatgctgttactaggagagttttgagatactgcagtggatgtgggatgtatatgaacttcttcataatgtactcctgggaactgggtaggacatatccatattgtagttcccaaggtgtctggttgagagttagagaacttttaaatttctttagccagacaggtctctatttttttaagttatccaggactccaagaaccatagttactgaaaagggagtcctgatacatctaatattggtagcatgtaacagtgtttgacaaagagtaagtaagcagtattcttgggagtcagtgttatgtgtttcagcagagtattattttgtatatgtatgccattttctccctgcaaagcagctcaacaagagaaaaagctctagttatagggcttaaattgatttctatttcaaataatttcctaagagattctagagtagaactgaagagtattctattggaaaagtgaaaggaaagaaatgtaattttctttgaacatgaaaaagaaaacaactttgagagtagtcatttagcagtagatgtgcattattatgagaaaacagttctataagtccagggttaattatattaattggaatgtcagtctttaatgtcgagcttattgtagggtagaaaagagctttctactcagctaacgattactcattgatccaaaacttaaatacatctataatttcctggggctattgtgagtactgtgtatgtatttagcaaatatttaagacctagtaagtgctcaataaattgtagctgttattgctgttgttgtttgtacctctaaaaaaa

SEQ ID NO: 99 - DNA, 3713 bp, Homo sapiens
  mRNA (1)..(3713): gi|48762680|ref|NM_000701.6| Homo sapiens ATPase, Na+/K+ transporting, alpha 1 polypeptide (ATP1A1), transcript variant 1
attttaggaagtgaggaggaggcgcgggctggagctgcggcggggtctggggcgcagagcagcggcgggaggaggcggacacgtggcaacagcggtagcagcccgggcggcggcagcaacagcggcggcggcatcggcccgagccgccggccgccctcccaccctcccgccccgcggcagccctagctccctccacttggctcccctggtcccgctcgctcggccgggagctgctctgtgcttttctctctgattctccagcgacaggacccggcgccgggcactgagcaccgccaccatggggaagggggttggacgtgataagtatgagcctgcagctgtttcagaacaaggtgataaaaagggcaaaaagggcaaaaaagacagggacatggatgaactgaagaaagaagtttctatggatgatcataaacttagccttgatgaacttcatcgtaaatatggaacagacttgagccggggattaacatctgctcgtgcagctgagatcctggcgcgagatggtcccaacgccctcactccccctcccactactcctgaatggatcaagttttgtcggcagctctttggggggttctcaatgttactgtggattggagcgattctttgtttcttggcttatagcatccaagctgctacagaagaggaacctcaaaacgataatctgtacctgggtgtggtgctatcagccgttgtaatcataactggttgcttctcctactatcaagaagctaaaagttcaaagatcatggaatccttcaaaaacatggtccctcagcaagcccttgtgattcgaaatggtgagaaaatgagcataaatgcggaggaagttgtggttggggatctggtggaagtaaaaggaggagaccgaattcctgctgacctcagaatcatatctgcaaatggctgcaaggtggataactcctcgctcactggtgaatcagaaccccagactaggtctccagatttcacaaatgaaaaccccctggagacgaggaacattgccttcttttcaaccaattgtgttgaaggcaccgcacgtggtattgttgtctacactggggatcgcactgtgatgggaagaattgccacacttgcttctgggctggaaggaggccagacccccattgctgcagaaattgaacattttatccacatcatcacgggtgtggctgtgttcctgggtgtgtctttcttcatcctttctctcatccttgagtacacctggcttgaggctgtcatcttcctcatcggtatcatcgtagccaatgtgccggaaggtttgctggccactgtcacggtctgtctgacacttactgccaaacgcatggcaaggaaaaactgcttagtgaagaacttagaagctgtggagaccttggggtccacgtccaccatctgctctgataaaactggaactctgactcagaaccggatgacagtggcccacatgtggtttgacaatcaaatccatgaagctgatacgacagagaatcagagtggtgtctcttttgacaagacttcagctacctggcttgctctgtccagaattgcaggtctttgtaacagggcagtgtttcaggctaaccaggaaaacctacctattcttaagcgggcagttgcaggagatgcctctgagtcagcactcttaaagtgcatagagctgtgctgtggttccgtgaaggagatgagagaaagatacgccaaaatcgtcgagatacccttcaactccaccaacaagtaccagttgtctattcataagaaccccaacacatcggagccccaacacctgttggtgatgaagggcgccccagaaaggatcctagaccgttgcagctctatcctcctccacggcaaggagcagcccctggatgaggagctgaaagacgcctttcagaacgcctatttggagctggggggcctcggagaacgagtcctaggtttctgccacctctttctgccagatgaacagtttcctgaagggttccagtttgacactgacgatgtgaatttccctatcgataatctgtgctttgttgggctcatctccatgattgaccctccacgggcggccgttcctgatgccgtgggcaaatgtcgaagtgctggaattaaggtcatcatggtcacaggagaccatccaatcacagctaaagctattgccaaaggtgtgggcatcatctcagaaggcaatgagaccgtggaagacattgctgcccgcctcaacatcccagtcagccaggtgaaccccagggatgccaaggcctgcgtagtacacggcagtgatctaaaggacatgacctccgagcagctggatgacattttgaagtaccacactgagatagtgtttgccaggacctcccctcagcagaagctcatcattgtggaaggctgccaaagacagggtgctatcgtggctgtgactggtgacggtgtgaatgactctccagctttgaagaaagcagacattggggttgctatggggattgctggctcagatgtgtccaagcaagctgctgacatgattcttctggatgacaactttgcctcaattgtgactggagtagaggaaggtcgtctgatctttgataacttgaagaaatccattgcttataccttaaccagtaacattcccgagatcaccccgttcctgatatttattattgcaaacattccactaccactggggactgtcaccatcctctgcattgacttgggcactgacatggttcctgccatctccctggcttatgagcaggctgagagtgacatcatgaagagacagcccagaaatcccaaaacagacaaacttgtgaatgagcggctgatcagcatggcctatgggcagattggaatgatccaggccctgggaggcttctttacttactttgtgattctggctgagaacggcttcctcccaattcacctgttgggcctccgagtggactgggatgaccgctggatcaacgatgtggaagacagctacgggcagcagtggacctatgagcagaggaaaatcgtggagttcacctgccacacagccttcttcgtcagtatcgtggtggtgcagtgggccgacttggtcatctgtaagaccaggaggaattcggtcttccagcaggggatgaagaacaagatcttgatatttggcctctttgaagagacagccctggctgctttcctttcctactgccctggaatgggtgttgctcttaggatgtatcccctcaaacctacctggtggttctgtgccttcccctactctcttctcatcttcgtatatgacgaagtcagaaaactcatcatcaggcgacgccctggcggctgggtggagaaggaaacctactattagccccccgtcctgcacgccgtggagcatcaggccacacactctgcatccgacacccaccccctctttgtgtacttcagtcttggagtttggaactctaccctggtaggaaagcaccgcagcatgtggggaagcaagacgtcctggaatgaagcatgtagctctatggggggaggggggagggctgcctgaaaaccatccatctgtggaaatgacagcggggaaggtttttatgtgcctttttgtttttgtaaaaaaggaacacccggaaagactgaaagaatacattttatatctggatttttacaaataaagatggctattataatggaaaaaaaaaaaaaaa

SEQ ID NO: 100 - DNA, 3723 bp, Homo sapiens
  mRNA (1)..(3723): gi|7382490|ref|NM_002298.2| Homo sapiens lymphocyte cytosolic protein 1 (L-plastin) (LCP1), transcript variant 5
tttttctttcctggctgatgatttgtcattctagtcacttcctgccttgtgaccacacacccaggcttgacaaagctgttctgcagatcagaaagaaggggttcctggtcatacaccagtactaccaaggacagcttttttcctgcaagatctgttacctaaagcaataaaaaatggccagaggatcagtgtccgatgaggaaatgatggagctcagagaagcttttgccaaagttgatactgatggcaatggatacatcagcttcaatgagttgaatgacttgttcaaggctgcttgcttgcctttgcctgggtatagagtacgagaaattacagaaaacctgatggctacaggtgatctggaccaagatggaaggatcagctttgatgagtttatcaagattttccatggcctaaaaagcacagatgttgccaagacctttagaaaagcaatcaataagaaggaagggatttgtgcaatcggtggtacttcagagcagtctagcgttggcacccaacactcctattcagaggaagaaaagtatgcctttgtcaactggataaacaaagccctggaaaatgatcctgattgtcggcatgtcatcccaatgaacccaaacacgaatgatctctttaatgctgttggagatggcattgtcctttgtaaaatgatcaacctgtcagtgccagacacaattgatgaaagaacaatcaacaaaaagaagctaacccctttcaccattcaggaaaatctgaacttggctctgaactctgcctcagccatcgggtgccatgtggtcaacataggggctgaggacctgaaggaggggaagccttatctggtcctgggacttctgtggcaagtcatcaagattgggttgtttgctgacattgaactcagcagaaatgaagctctgattgctcttttgagagaaggtgagagcctggaggatttgatgaaactctcccctgaagagctcttgctgaggtgggctaattaccacctggaaaatgcaggctgcaacaaaattggcaacttcagtactgacatcaaggactcaaaagcttattaccacctgcttgagcaggtggctccaaaaggagatgaagaaggtgttcctgctgttgttattgacatgtcaggactgcgggagaaggatgacatccagagggcagaatgcatgctgcagcaggcggagaggctgggctgccggcagtttgtcacagccacagatgttgtccgagggaaccccaagttgaacttggcttttattgccaacctctttaacagataccctgccctgcacaaaccagagaaccaggacattgactggggggctcttgaaggtgagacgagagaagagcggacatttaggaactggatgaactccctgggtgttaaccctcgagtcaatcatttgtacagtgacttatcagatgccctggtcatcttccagctctatgaaaagatcaaagttcctgttgactggaacagagtaaacaaaccgccataccccaaactgggaggcaatatgaagaagcttgagaattgtaactacgcggtagaattggggaagaatcaagcgaagttctccctggttggcatcggtggacaagatctcaatgaaggaaaccgcactctcacactggccttgatttggcagctaatgagaaggtatacactgaatatcctcgaagaaattggtggtggccagaaggtcaatgatgacattattgtcaactgggtgaatgaaacattgagggaagcagagaaaagttcatccatctctagtttcaaggacccgaagattagtacaagtctgcctgttctggacctcatcgatgccatccaaccaggttccattaactatgaccttctgaagacagaaaatctgaatgatgatgagaaactcaacaatgcaaaatatgccatctctatggcccgaaaaattggagcaagagtgtatgccctgccagaagacctggttgaagtgaaccccaaaatggtcatgaccgtgtttgcctgcctcatggggaaaggaatgaagagggtgtgaggccaatggggctgggtgggaggcggtgcactcactcctgactgcccggcacagatgctccagggatgattcaagccattccaaagttcaacttggtgacactctataagattccaaaaagcacatattagtgcagccaagtagcctctcctgtatttaacaaaaagtgcttcattctttgcaggaggcccaacctcctatatataggtttctattcttgatttatttgcttcttcgaaaatctagaggaaaagaaagaagttattttccaggtacccttctcgcttttgccattagccaaggatagaagctgcagtggtattaattttgatataatctttcaaaccagcttgttgtggcttcccttttctttgttcaagatgagggccaggaggggaaacatcacacctgccctaaaccctgttcctggaggtcagcatttgatctgttgcaagcccctctttctgtcccctcttcctaccctgcctcccatgactttgctcctcacacttttggaaccatgccttccgggggggcccatctcttctggcggtccttgtctctgggccacttggagtgtgtgataaatcagtcaagctgttgaagtctcaggagtctctggtagcctgcagaagtaagcctcatcatcagagcctttcctcaaaactggagtcccaaatgtcatcaggttttgttttttttcagccactaagaacccctctgcttttaactctagaatttgggcttggaccagatctaacatcttgaatactctgccctctagagccttcagccttaatggaaggttggatccaaggaggtgtaatggaatcggaatcaagccactcggcaggcatggagctataactaagcatccttagggttctgcctctccaggcattagccctcacattagatctagttactgtggtatggctaatacctgtcaacatttggaggcaatcctaccttgcttttgcttctagagcttagcatatctgattgttgtcaggccatattatcaatgtttacttttttggtactataaaagctttctgccacccctaaactccaggggggacaatatgtgccaatcaatagcacccctactcacatacacacacacctagccagctgtcaagggcagaatgaatctatgctggataagaaatggtggaactgcgttatgaagagctaatttactggacaaagaattccaaagcaaaaccagaacagtatgaatttgagcaggtctcataggttgagcaatttccccctaaaccaactgaaggctaaaaagcaacaggccattgtgaaccaatgcaagacgccctctatcatggtgaaaagctccatcaatgaggtatcttctttagtggtggtatgtaatggaacttagccatttttcaaagcaattgaaatgcattgctctggatctgttccttggcagtggactcagaaagccaacatgtggctcctcccagcccataaccagtatttttgctgcttctgaatacaaattggttggttttgacttcagattgaacttactgtagcctcagatgatttcccccctccgcctcccaggaagaaagaatgttactgccttaataaaaaatgaaaagagaatgatgctcaaaatctttccaaataaaatgttccctat

SEQ ID NO: 101 - DNA, 4387 bp, Homo sapiens
  mRNA (1)..(4387): gi|34147326|ref|NM_015179.2| Homo sapiens KIAA0690 (KIAA0690)
cacgtgggttctgagcgtgtttctacgtccctggaagccggtcatttaagctcattcctcgccacggcttagtcaacatgggtcgctcgggaaagttgccctctggtgtctcagctaagttgaagcgctggaagaaaggccacagcagcgacagcaaccccgccatctgccgccaccgtcaggccgcccgcagccgcttcttcagccggccgtcaggaaggagtgacctgacagtcgatgctgtgaagttacataatgagctgcagtcagggtccttgcgcttgggcaaaagcgaagccccggagacgcccatggaagaagaggcggagctggttctcaccgagaagtcctcgggtaccttcctgagtggcctttccgactgcacaaacgtcaccttcagcaaagtacagcgcttctgggagtccaactcggctgcccacaaggagatctgtgctgttctggctgctgtcactgaggtgattcgctcccagggagggaaggagacggagactgagtacttcgctgctctgatgacaacaatggaagcagtggagtccccggagtccctggccgccgttgcttacctgctgaaccttgtcctgaagcgtgttcccagccctgtgcttattaagaagttctctgatacctccaaagccttcatggatatcatgtcagctcaggccagcagcggctccacctctgtcctccgatgggtcctttcctgcctggccacccttctgcggaagcaagacctggaggcctggggctaccccgtgacccttcaggtgtaccatgggctgctgagcttcacggtgcatcccaagcccaagatccggaaggctgcccagcatggagtatgctcagtcctcaagggcagtgaattcatgtttgaaaaggcccctgcccatcatcctgctgccatttccactgccaagttctgcatccaggagattgagaagtctggaggctccaaggaggccaccaccacgctgcacatgctgacgctgctgaaggacctgctgccctgcttcccggaaggcctggtgaagagctgcagtgagactctcctcagggtcatgaccttgagccatgtgctggtgacagcctgtgccatgcaggcctttcacagcctcttccacgccaggcctggcctgagcaccctgtcagcagagctcaacgcccagatcatcacggccctgtacgactatgttcccagtgagaatgatttacaacccctgctagcctggcttaaggtcatggagaaagcccacatcaacctggtgaggttgcagtgggacctggggctaggccacctccctcgcttttttggaactgcggtgacctgcctcctttccccacactcgcaagtgctgactgctgctacgcagagcctcaaggagatcctgaaggaatgcgtggctccccacatggctgacattggctccgtgacctcctcggcctcaggccctgcccaatctgttgccaagatgttcagggcagtggaggagggcctgacgtacaaattccatgcggcctggagctccgtgttgcagctgctgtgtgtcttcttcgaggcgtgtgggagacaggcccaccctgtgatgaggaagtgcctccagtccctgtgtgacctgcgcctctcccctcatttcccccacacggcggctcttgaccaggcagtgggggctgcggtgaccagtatgggacctgaggtggtgctgcaggctgtgcctttggaaattgatggctctgaggagactctggatttcccacggagctggctgctgcctgtcatccgagaccatgttcaggaaacgcgacttggttttttcaccacctacttcttgcccctggctaacaccctgaagagcaaagccatggacctggctcaggcaggcagcacagtggaatctaagatctacgacacactccagtggcagatgtggacactcctgcctgggttctgcacaaggcctacagatgtggccatctccttcaaagggctggcacggacgctgggcatggccatcagcgagcgtccagacctgagggtcaccgtgtgccaggccctgcgcaccctcatcaccaagggctgccaggcagaggctgaccgtgctgaagtgagtcgctttgccaagaactttctgccgatcctcttcaacctgtatgggcagcccgtggcagccggggacactccagcccctcgccgggctgtgctggaaaccatcagaacttacctcaccatcactgacactcagttggtgaacagtctcctggaaaaagccagtgagaaggtgctcgaccctgccagctctgactttaccagattgtctgtcctggacctggtcgtggccttggctccgtgtgctgacgaagctgccatcagtaagctatactccaccatccggccctacctagagagcaaggcccacggggtgcagaagaaggcctaccgagtgctggaggaggtgtgtgccagtcctcagggccccggggccctcttcgtgcagagccacctggaggacctgaagaagacactgctggactcgctgcggagcacctcctcacccgccaagaggccccgtttgaagtgcctcctacacatcgtgaggaagctctcagctgaacacaaggagttcatcactgccctcatcccagaggtgatcctgtgcaccaaggaggtgtcggtgggcgcacggaagaacgcttttgcactgctcgtggagatgggccatgctttcctaaggtttggctcgaaccaggaagaggccctgcagtgctacctcgtcctgatctaccctggcctggtgggcgcggtgaccatggtcagctgcagcatcctggccctgacccacctccttttcgagtttaaaggtctgatggggaccagtacagtggagcagctgctggagaatgtgtgcctgcttctggcctcccgcacccgtgacgtggtcaagtctgcactgggcttcatcaaggtggcagtgactgtcatggacgtggcgcacctggccaaacatgtgcagctggtgatggaagccattgggaagctttcagatgacatgcggcggcacttccgcatgaagcttcggaacctgttcaccaagttcatccgcaagtttggatttgagctggtgaaaaggctgttgcccgaggagtaccacagagtcctggtcaacatccggaaagctgaggcccgggccaagaggcaccgagccctgagccaggctgccgtggaggaggaagaagaggaggaggaggaggaggagcccgcccagggcaaaggtgacagcattgaggagattttagctgactcagaggacgaggaggacaatgaggaggaggaaagaagccgaggcaaggagcagcggaagctggcacgacagaggagccgggcatggctgaaagagggcggtggggacgagcccctcaacttcctggatcccaaggtggcccaacgagtcctggccacgcagccagggccaggccggggcaggaagaaggaccacagcttcaaggtgagcgccgatggccggctgatcataagggaggaggcagacggcaacaagatggaggaagaggaaggtgccaaaggcgaagatgaagagatggctgacccaatggaagatgtgatcatcaggaataaaaagcaccagaagctcaagcaccagaaagaggctgaggaggaggagctggagataccccctcagtaccaagctggaggctctggcattcatcgccctgtggccaagaaggctatgcctggggctgaatacaaggccaagaaagcaaaaggtgatgtgaagaagaaaggccggccggatccctatgcctacatccccctcaacagaagcaagctcaaccgcaggaagaagatgaagctgcagggacagttcaaaggcctggtgaaggctgcccggcgaggttcccaggtgggacacaaaaaccgcagaaaggatcgtcgaccctgaggcccagggcccctgggctgccctgtggtccagtctgaggccctttcagcccccaggctgccttgccaccagctccaggtgctcaagattctggcagagcctggactcaggatgacttggaactagggcttggctctcagaagtcctggattttggaaactccaaatggaatcacccttcagagacatccctggtgcctggagatgggaatgtggcctcagtgcctctgagtaggtgccatgaggcacctttgctttctgcccagagtggccatgagcaccagaacagatgatctccatttccgccagctgcctgtagccacgtggcatcctgcctgtggtctgggtgagatttactgtgaccagatgtagaataaatgtgtctcatcctgcaaaaaaaaaaaaaaaaaaaaaaaa

SEQ ID NO: 102 - DNA, 3018 bp, Homo sapiens
  mRNA (1)..(3018): gi|21264342|ref|NM_002967.2| Homo sapiens scaffold attachment factor B (SAFB)
ataaaaccggcccggttctgtggaaagtgggcggcggagccagggtccctggaatggcggagactctgtcaggcctaggtgattctggagcggcgggcgcggcggctctgagctccgcctcgtcagagaccgggacgcggcgcctcagcgacctgcgagtgatcgatctgcgggcggagctgaggaaacggaatgtggactcgagcggcaacaagagcgttttgatggagcggctgaagaaggcaattgaagatgaaggtggtaatcctgacgaaattgaaattacctccgagggaaacaagaaaacatcaaagaggtctagcaaagggcgcaaaccagaagaagagggtgtggaagataacgggctggaggaaaactctggggatggacaggaggatgttgagaccagtctggagaacttgcaggacatcgacatcatggatatcagtgtgttggatgaagcagaaattgataatggaagcgttgcagattgtgtcgaagacgatgatgctgataacctccaggagtccctgtcggatagtagagagctagtcgagggggaaatgaaagagcttccggagcagcttcaggaacatgctatagaggacaaagaaactataaacaatttagatacttcatcatctgacttcactatattacaggaaattgaagagccatccctggagccagaaaatgagaaaatactcgacattttgggggaaacttgtaaatctgagccagtaaaagaagaaagttccgagctggagcagccatttgcacaggacacaagtagcgtggggccagacagaaagcttgcggaggaagaggacctatttgacagcgcccatccggaagagggtgatttagatttggccagcgagtcaacagcacacgctcagtcgagcaaggcagacagcctgttagcggtagtgaaaagggagcccgcggagcagccaggcgatggcgagaggacggactgtgagcctgtagggctagagccggcagttgagcagagtagtgcggcctccgagctcgcggaggcctctagcgaggagctcgcagaagcacccacggaagccccaagcccagaagccagagatagcaaagaagacgggaggaagtttgattttgacgcttgtaatgaagtccctccggctcctaaagagtcctcaaccagtgagggcgctgatcagaaaatgagttctcccgaagatgactcggatacaaaaaggctttccaaagaggaaaagggtcgcagcagttgtggtagaaatttctgggttagtggactctcttctacaaccagagctacagatttgaagaatcttttcagcaaatatgggaaggtggtgggcgccaaggttgtgacaaatgcccggagtcctggagctcgctgttacggttttgtcacgatgtccacagcagaagaggccacaaaatgcattaaccacctgcacaagacggagctccacggaaagatgatctccgtggagaaagccaaaaatgaacctgtgggaaagaaaacctctgacaaaagagacagtgacgggaaaaaggagaagtcgagcaacagtgacagatctacaaaccttaagagggatgataaatgtgacagaaaagatgatgctaagaagggtgacgacggaagtggagaaaagagtaaggaccaagatgatcagaaacctggcccctcagagcgatctcgagccacaaagtcaggaagtcgagggaccgaacggactgtagtaatggataaatccaaaggggtgcctgtgattagtgtaaaaacgtccgggtccaaagagagagcttccaaaagccaggatcgcaaatcagccagcagagagaagcggtccgtcgtgtcctttgataaggtcaaggagcctcggaagtcaagagactcagagtcccatagcagggtgcgtgaacgcagtgaacgcgaacaacgcatgcaggcgcagtgggagcgcgaggagcgtgagcggctggagattgcccgagagaggctggccttccagcgccagcggctggagcgggagcgcatggagcgggaacggctggagcgcgaacgcatgcacgtggagcacgagcgcaggcgcgagcaggagcgcatccaccgtgagcgcgaggagctgaggcgccagcaggaactgcgctatgagcaggagcggcggcccgcggtgcggcggccctacgacctggaccggcgagatgatgcctattggccggaagccaagcgggccgccctggatgagcgctaccattctgactttaaccgccaggaccgcttccacgactttgaccacagggaccgcggccgctaccccgaccactcggtggacaggagagaaggttcaaggtcaatgatgggagaacgagaaggacagcattacccagaacgccatggaggaccagagcgccacggccgggactcccgcgatggctgggggggctatggctctgacaagaggatgagcgagggccgggggctgcctcctccccccagacgtgactggggggaccatggccgaagagaggatgaccggtcatggcagggcacggccgacgggggcatgatggacagggatcacaagaggtggcaaggtggcgagagaagcatgtccggtcactccgggcctggccacatgatgaaccgaggaggaatgtcagggcgcggcagctttgccccaggcggggcctcccggggccaccccatcccacacggtggcatgcagggcgggtttggaggccagagccgggggagcaggcccagcgatgcccgcttcactcgccgctactgagtacttggaatcctgtgtcctgtctcgtggcaacaaggctatgttctgttaggagttaccttaaactgtgtaaaaatatttttttttaatctgctgccatattgtagctcaatacaatgtgaatttgtttttcgttttggggttttttttttttgtaataaatgtgtttccgttcacataccctttaaaaaaaaaaaaaaaaaaaaaaaaaaaaaaa

SEQ ID NO: 103 - DNA, 2285 bp, Homo sapiens
  mRNA (1)..(2285): gi|21264342|ref|NM_002967.2| Homo sapiens scaffold attachment factor B (SAFB)
aaagttaagagtggcgccagggatttgaaccgcgctgacgaagtttggtgatccatcttccgagtatcgccgggatttcgaatcgcgatgatcatcccctctctagaggagctggactccctcaagtacagtgacctgcagaacttagccaagagtctgggtctccgggccaacctgagggcaaccaagttgttaaaagccttgaaaggctacattaaacatgaggcaagaaaaggaaatgagaatcaggatgaaagtcaaacttctgcatcctcttgtgatgagactgagatacagatcagcaaccaggaagaagctgagagacagccacttggccatgtcaccaaaacaaggagaaggtgcaagactgtccgtgtggaccctgactcacagcagaatcattcagagataaaaataagtaatcccactgaattccagaatcatgaaaagcaggaaagccaggatctcagagctactgcaaaagttccttctccaccagacgagcaccaagaagctgagaatgctgtttcctcaggtaacagagattcaaaggtaccttcagaaggaaagaaatctctctacacagatgagtcatccaaacctggaaaaaataaaagaactgcaatcactactccaaactttaagaagcttcatgaagctcattttaaggaaatggagtccattgatcaatatattgagagaaaaaagaaacattttgaagaacacaattccatgaatgaactgaagcagcccatcaataagggaggggtcaggactccagtacctccaagaggaagactctctgtggcttctactcccatcagccaacgacgctcgcaaggccggtcttgtggccctgcaagtcagagtaccttgggtctgaaggggtcactcaagcgctctgctatctctgcagctaaaacgggtgtcaggttttcagctgctactaaagataatgagcataagcgttcactgaccaagactccagccagaaagtctgcacatgtgaccgtgtctgggggcaccccaaaaggcgaggctgtgcttgggacacacaaattaaagaccatcacggggaattctgctgctgttattaccccattcaagttgacaactgaggcaacgcagactccagtctccaataagaaaccagtgtttgatcttaaagcaagtttgtctcgtcccctcaactatgaaccacacaaaggaaagctaaaaccatgggggcaatctaaagaaaataattatctaaatcaacatgtcaacagaattaacttctacaagaaaacttacaaacaaccccatctccagacaaaggaagagcaacggaagaaacgcgagcaagaacgaaaggagaagaaagcaaaggttttgggaatgcgaaggggcctcattttggctgaagattaataattttttaacatcttgtaaatattcctgtattctcaacttttttccttttgtaaattttttttttttgctgtcatccccactttagtcacgagatctttttctgctaactgttcatagtctgtgtagtgtccatgggttcttcatgtgctatgatctctgaaaagacgttatcaccttaaagctcaaattctttgggatggtttttacttaagtccattaacaattcaggtttctaacgagacccatcctaaaattctgtttctagatttttaatgtcaagttcccaagttccccctgctggttctaatattaacagaactgcagtcttctgctagccaatagcatttacctgatggcagctagttatgcaagcttcaggagaatttgaacaataacaagaatagggtaagctgggatagaaaggccacctcttcactctctatagaatatagtaacctttatgaaacggggccatatagtttggttatgacatcaatattttacctaggtgaaattgtttaggcttatgtaccttcgttcaaatatcctcatgtaattgccatctgtcactcactatattcacaaaaataaaactctacaactcattctaacattgcttacttaaaagctacatagccctatcgaaatgcgaggattaatgctttaatgcttttagagacagggtctcactgtgttgcccaggctggtctcaaactccaccaaatgtacttcttattcattttatggaaaagactaggctttgcttagtatcatgtccatgtttccttcacctcagtggagcttctgagttttatactgctcaagatcgtcataaataaaattttttctcattgtcataaaaaaaaaaaaaa

SEQ ID NO: 104 - DNA, 2963 bp, Homo sapiens
  mRNA (1)..(2963): gi|5802969|ref|NM_006796.1| Homo sapiens AFG3 ATPase family gene 3-like 2 (yeast) (AFG3L2), nuclear gene encoding mitochondrial protein
cgcttcgctgcctggcggcctttccccgagccgagcccgcttcccgaggccgccagtcgtcgcctgcccgcgcctgcgcagcgtcccgggccgagagggccacggcggcggccatggcgcaccgctgtttgcggctgtggggccggggcggctgctggccccgcggcctacagcagctcctcgtgcctggcggcgtgggcccgggcgagcagccctgcctccggacgctttaccgatttgttacaactcaagcaagggccagcagaaattctcttttgacagatataattgctgcttatcaaagattctgttctcgacccccaaaaggatttggaaaatactttcctaatggaaaaaatggaaaaaaagctagtgaacctaaagaagttatgggagagaaaaaagaatcaaagccagctgctaccacacgctcttctggaggaggaggtggtggcggtggaaaacgaggtggcaagaaagatgattctcactggtggtccaggtttcagaagggtgacattccatgggacgacaaggatttcaggatgttcttcctctggactgctctgttctggggtggagtcatgttttacttgctgctcaagagatccgggagagaaatcacttggaaggactttgtcaataactatctttcaaaaggagtagtagacagattggaagtcgtcaacaagcgttttgttcgagtgacctttacaccaggaaaaactcctgttgatgggcaatacgtttggtttaatattggcagtgtggacacctttgaacggaatctggaaactttacagcaggaattgggcatagaaggagaaaatcgggtgcctgttgtctacattgctgaaagtgatggctcttttctgctgagcatgctgcctacggtgctcatcatcgccttcttgctctacaccatcagaagagggcctgctggcattggccggacaggccgagggatgggcggactcttcagtgtcggagaaaccactgccaaggtcttaaaggatgaaattgatgtgaagttcaaagatgtggctggctgtgaggaggccaagctagagatcatggaatttgtgaatttcttgaaaaacccaaagcagtatcaagacctaggagcaaaaatcccaaagggtgccattctcactggtcctccaggcactgggaagacgctgctagctaaggccacagccggagaagccaatgtccccttcatcaccgttagtggatctgagtttttggagatgttcgttggtgtgggccctgctagagtccgagacttatttgcccttgctcggaagaatgccccttgcatcctcttcatcgatgaaatcgatgcggtgggaaggaagagaggaagaggcaactttggagggcagagtgagcaggagaacacactcaaccagctgctggtggagatggatggttttaatacaacaacaaatgtcgtcattttggccggcaccaatcgaccagatatcctggaccccgcgctacttaggccggggcgtttcgacaggcagatctttattggaccaccagacataaaaggaagagcttctattttcaaagttcatctccgaccgctaaaactggacagtaccctggagaaggataaattggcaagaaaactggcatctttaactccagggttttcaggtgctgatgttgctaatgtctgtaatgaagctgcgttgattgctgcaaggcatctgtcagattccataaatcagaaacactttgaacaggcaattgagcgagtgattggtggcttagagaagaaaacgcaggttctgcagcctgaggagaagaagactgtggcataccacgaagcaggccatgcggttgccggctggtatctggagcacgcagacccgcttttaaaggtatccatcatcccacgtggcaaaggactaggttatgctcagtatttaccaaaagaacaatacctctataccaaagagcagctcttggataggatgtgtatgactttaggtggtcgagcctctgaagaaatcttctttggaagaattacaactggtgctcaagatgacttgagaaaagtaactcagagtgcatatgcccaaattgttcagtttggcatgaatgaaaaggttgggcaaatctcctttgacctcccacgtcagggggacatggtattggagaaaccttacagtgaagccactgcaagattgatagatgatgaagtacgaatacttattaatgatgcttataaaagaacagtagctcttctcacagaaaagaaagctgacgtggagaaggttgctcttctgttgttagaaaaagaagtattagataagaatgatatggttgaacttttgggccccagaccatttgcggaaaaatctacctatgaagaatttgtggaaggcactggcagcttggatgaggacacctcacttccagaaggccttaaggactggaacaaggagcgggaaaaggagaaagaggagcccccgggtgagaaagttgccaactagaggcccagagggaggccatctcagtctctccactgtggtttcagctggtgcattatttcagctgtggctttcagaagaatgggaatgctgcgctgattttagccagccactggcccagctgaaatgatggggaaaggagtccttagtcctttcagcctcagaggtcacagtgggtggcaggtgactttccggaggccttgagggaaatgcacactgtcccatagcctcattgggctcccagacgtgctggaaaggttgagcccagagtggccgaggctggaccctgtggcaccaagtggggtcggctgaccgtgtggcagggatcgttgcactggactcttggcgtgtgggaagggatgctttctctttgtcgcccactcttcattcctgtttctcctcagttcccctgtgcagatgggctgtgaaattaaattggagtcttgataagaacatttt

SEQ ID NO: 105 - DNA, 2869 bp, Homo sapiens
  mRNA (1)..(2869): gi|32455232|ref|NM_005558.3| Homo sapiens ladinin 1 (LAD1)
ggtccacccagtgcttgcggcctcgcggccgggccggcctgggctgcaatcaatgcggctttgtctgggacgcccacatcccagaggccattcccgggtcggcaaatcggagcgcggccggggcgcgcgggggtgagataagcggccatgtgatcccacctgggctggaaggggaggggcgccaggtgaggcggcggccggcggggcgcgggcggccacgcggggctcctgcagcatggctgtcagcaggaaggactggtccgcgctgtccagccttgcccggcagaggactctggaggatgaggaggaacaggagcgcgagcgcaggcggcggcaccgcaacctgagctccaccacggacgatgaggctcccaggctcagccagaatggagaccggcaggcctctgcttctgagagactaccgagcgtggaagaagcagaggtgcccaagccactgcccccagcctccaaagatgaggacgaggacatccagagcatcctcagaacacggcaggagcggaggcagaggcggcaggtggtggaggctgcacaggcccccatccaggagaggctggaggcagaggaggggaggaacagcttgagccctgtgcaggccacacagaaacccctagtctccaagaaggaactggaaatcccacctcgccggagactgagtcgggaacagcggggcccctgggccctggaggaggagagcttggtgggcagggagccagaagagaggaagaaaggggttccagaaaagtccccagtcttggagaagtcctccatgccaaagaagacggcacctgaaaagagcctggtctccgataaaacctccatctctgagaaggtgctggcctcagagaagacatctctatcagagaagatagcagtgtcagagaaaagaaacagctcagagaagaagtctgttctagaaaaaaccagtgtctctgagaagtcgctggccccagggatggcactgggctcaggaaggaggctggtgtctgagaaagcttccatctttgagaaggcactggcctcagagaagagcccaactgcagatgctaagccggccccaaagagggccacagcctcagagcagcccctggcgcaggagccgccagcctctgggggaagcccagccaccaccaaggagcagagaggaagggccctccctgggaagaacctgccctctttggcaaagcagggggcttcagaccctccgactgtggcctcccgcctcccacccgtcacactccaggtgaaaatccccagcaaggaggaagaggcagatatgtcctcacccacacagcgaacctacagcagctccctcaaacgctccagccccaggaccatctcctttcggatgaaacccaagaaagaaaactcggaaacaaccctaactcgcagtgccagcatgaagctcccagacaacacagtgaagttgggagagaagctggagagataccacacggccatacggagatcagaatctgtcaagtctcggggtctgccttgcactgagttattcgtggctcctgtgggtgtagccagcaagcgccacctctttgagaaggaactggcgggccagagccgagcagaaccagcctccagccggaaggagaacttgaggctctcaggggttgtgacatcaaggctcaacctgtggatcagcaggacccaggaatctggagatcaggacccccaggaggcacagaaagcatcatctgcaaccgagaggactcagtggggacagaaatctgactcctcgctggacgctgaggtgtgacaagccccgccaagacagacctgcaagtcttcgtctcaagggacctccctcatgccaggcccctgcctctcacagcagcaccctttcctctcattgtccctgttccctttttgcctgtggatctgtttggccagggtccctggggtcaggaatatttgcaagactcagccagctccttcccagcccagcctcttggggctgggactttctcaccctgcggcaggcacaacagatgctgggacccagtctctgcccaggtcacagcacaagtgcacatcagcactatggggcctatgtcctgcccagagacctctgctccttcctgctcacatccacagtcagggcacggcgcccctcaagaactccagagtcacctgtctcatcggctcccagcaagtgcctctttgtctatgatgtcccccttctctgaggcctggacccacccatctttgtccctggggcctgctcccagccactgaggcccgctctggccaggggagaaggagctgccgtgcgtcttccctgtgccccgtctccctgcttggttctcccctcccttccctggccggctgccatggccaggagctaagtgcctttttgtgtgcaaccacttaccctttctctgaaaaacctgttctcaggaaggatctgataaactcatttactctcaggtgtaagagactgatgagaccttagaagcgaattcctctctggaggccttgctttctagcagaggtcacctgaagtgtgtgaggaggatcatcattttcctcatcccccctcttctcacattaaggtggtggcttgccactcagcagtcctagcttggtgactgggaactgccacatacagggccaggcctaccctccttccccacaagccccctccaacccccacccccatgctctggacctcatggctcctatgagcttggagcatggtgaaccatcagagaatctagaaccaaccaagctaggaacatcagcctggtgccctgttaaccccttaaagctgtggtttacaacttttcaaaaatttaaatcattagaaaaaaaaaaaaaaaaaaaaaaaaaaaaaaaa

SEQ ID NO: 106 - DNA, 2721 bp, Homo sapiens
  mRNA (1)..(2721): gi|63252864|ref|NM_006812.2| Homo sapiens amplified in osteosarcoma (OS9), transcript variant 1
gaggccgctgcctggcttagggcggaaacagattctctgcataagaaggggaacgaaagatggcggcggaaacgctgctgtccagtttgttaggactgctgcttctgggactcctgttacccgcaagtctgaccggcggtgtcgggagcctgaacctggaggagctgagtgagatgcgttatgggatcgagatcctgccgttgcctgtcatgggagggcagagccaatcttcggacgtggtgattgtctcctctaagtacaaacagcgctatgagtgtcgcctgccagctggagctattcacttccagcgtgaaagggaggaggaaacacctgcttaccaagggcctgggatccctgagttgttgagcccaatgagagatgctccctgcttgctgaagacaaaggactggtggacatatgaattctgttatggacgccacatccagcaataccacatggaagattcagagatcaaaggtgaagtcctctatctcggctactaccaatcagccttcgactgggatgatgaaacagccaaggcctccaagcagcatcgtcttaaacgctaccacagccagacctatggcaatgggtccaagtgcgaccttaatgggaggccccgggaggccgaggttcggttcctctgtgacgagggtgcaggtatctctggggactacatcgatcgcgtggacgagcccttgtcctgctcttatgtgctgaccattcgcactcctcggctctgcccccaccctctcctccggcccccacccagtgctgcaccgcaggccatcctctgtcacccttccctacagcctgaggagtacatggcctacgttcagaggcaagccgactcaaagcagtatggagataaaatcatagaggagctgcaagatctaggcccccaagtgtggagtgagaccaagtctggggtggcaccccaaaagatggcaggtgcgagcccgaccaaggatgacagtaaggactcagatttctggaagatgcttaatgagccagaggaccaggccccaggaggggaggaggtgccggctgaggagcaggacccaagccctgaggcagcagattcagcttctggtgctcccaatgattttcagaacaacgtgcaggtcaaagtcattcgaagccctgcggatttgattcgattcatagaggagctgaaaggtggaacaaaaaaggggaagccaaatataggccaagagcagcctgtggatgatgctgcagaagtccctcagagggaaccagagaaggaaaggggtgatccagaacggcagagagagatggaagaagaggaggatgaggatgaggatgaggatgaagatgaggatgaacggcagttactgggagaatttgagaaggaactggaagggatcctgcttccgtcagaccgagaccggctccgttcggaggtgaaggctggcatggagcgggaactggaaaacatcatccaggagacagagaaagagctggacccagatgggctgaagaaggagtcagagcgggatcgggcaatgctggctctcacatccactctcaacaaactcatcaaaagactggaggaaaaacagagtccagagctggtgaagaagcacaagaaaaagagggttgtccccaaaaagcctcccccatcaccccaacctacagaggaggatcctgagcacagagtccgggtccgggtcaccaagctccgtctcggaggccctaatcaggatctgactgtcctcgagatgaaacgggaaaacccacagctgaaacaaatcgaggggctggtgaaggagctgctggagagggagggactcacagctgcagggaaaattgagatcaaaattgtccgcccatgggctgaagggactgaagagggtgcacgttggctgactgatgaggacacgagaaacctcaaggagatcttcttcaatatcttggtgccgggagctgaagaggcccagaaggaacgccagcggcagaaagagctggagagcaattaccgccgggtgtggggctctccaggtggggagggcacaggggacctggacgaatttgacttctgagaccaacactacacttgacccttcacggaatccagactcttcctggactggcttgcctcctccccacctccccaccctggaacccctgagggccaaacagcagagtggagctgagctgtggacctctcgggcaactctgtgggtgtgggggccctgggtgaatgctgctgcccctgctggcagccaccttgagacctcaccgggcctgtgatatttgctctcctgaactctcactcaatcctcttcctctcctctgtggcttttcctgttattgtcccctaatgataggatattccctgctgcctacctggagattcagtaggatcttttgagtggaggtgggtagagagagcaaggagggcaggacacttagcaggcactgagcaagcaggcccccacctgcccttagtgatgtttggagtcgttttaccctcttctattgaattgccttgggatttccttctccctttccctgcccaccctgtcccctacaatttgtgcttctgagttgaggagccttcacctctgttgctgaggaaatggtagaatgctgcctatcacctccagcacaatcccagtgaaaaaggtgtgaagcacccaccatgttcttgaacaatcaggtttctaaataaacaactggaccatcaaaaaaaaaaaa

SEQ ID NO: 107 - DNA, 4830 bp, Homo sapiens
  mRNA (1)..(4830): gi|53759152|ref|NM_003400.3| Homo sapiens exportin 1 (CRM1 homolog, yeast) (XPO1)
caaccggttccgagtttgaggcactaggaggagggggagaagcggctgcagcggccgcggcaggagcagcgggagctacagcatcagcaagagcaacagtagctacagccccggcggcggtgcctgttccagtctttgctgctgcagtccgtgcaaccacccagagggggaggggggaaccaccagtcgctgaggaacaagagaaggggggaaagtttaggcgagccttgggggggggggggccagcgccggagccgcgtgagagagggagccgtgttttggtaggggggagtcggactgcaactggcagcagagcgtctccccggccgtgtggactctacaccccctactcctgccgcttctgctgctgcctgtggctggagggtccccctggggctgaatctttgggacttgaccccgttccctcccccttccctcactccccagccgggcgggagcatttattccccagattaattccccttttgggggggggcgggtgtgtgtgtgtgtgtgtgtgtgtgtgtgtgttgggggaagcgtccctgaaatagtaaatattattgagctctttttgcccttttcctgtccgtttttttaatttccttttttgaggtgggaaaactgaaacccaccttgattcgtcccctctcccccctccccaccttccctcgccctaatcccccaacgaggaaggaaggagcagttggttcaatctctggtaatctatgccagcaattatgacaatgttagcagaccatgcagctcgtcagctgcttgatttcagccaaaaactggatatcaacttattagataatgtggtgaattgcttataccatggagaaggagcccagcaaagaatggctcaagaagtactgacacatttaaaggagcatcctgatgcttggacaagagtcgacacaattttggaattttctcagaatatgaatacgaaatactatggactacaaattttggaaaatgtgataaaaacaaggtggaagattcttccaaggaaccagtgcgaaggaataaaaaaatacgttgttggcctcattatcaagacgtcatctgacccaacttgtgtagagaaagaaaaggtgtatatcggaaaattaaatatgatccttgttcagatactgaaacaagaatggcccaaacattggccaacttttatcagtgatattgttggagcaagtaggaccagcgaaagtctctgtcaaaataatatggtgattcttaaactcttgagtgaagaagtatttgatttctctagtggacagataacccaagtcaaatctaagcatttaaaagacagcatgtgcaatgaattctcacagatatttcaactgtgtcagtttgtaatggaaaattctcaaaatgctccacttgtacatgcaaccttggaaacattgctcagatttctgaactggattcccctgggatatatttttgagaccaaattaatcagcacattgatttataagttcctgaatgttccaatgtttcgaaatgtctctctgaagtgcctcactgagattgctggtgtgagtgtaagccaatatgaagaacaatttgtaacactatttactctgacaatgatgcaactaaagcagatgcttcctttaaataccaatattcgacttgcgtactcaaatggaaaagatgatgaacagaacttcattcaaaatctcagtttgtttctctgcacctttcttaaggaacatgatcaacttatagaaaaaagattaaatctcagggaaactcttatggaggcccttcattatatgttgttggtatctgaagtagaagaaactgaaatctttaaaatttgtcttgaatactggaatcatttggctgctgaactctatagagagagtccattctctacatctgcctctccgttgctttctggaagtcaacattttgatgttcctcccaggagacagctatatttgcccatgttattcaaggtccgtttattaatggttagtcgaatggctaaaccagaggaagtattggttgtagagaatgatcaaggagaagttgtgagagaattcatgaaggatacagattccataaatttgtataagaatatgagggaaacattggtttatcttactcatctggattatgtagatacagaaagaataatgacagagaagcttcacaatcaagtgaatggtacagagtggtcatggaaaaatttgaatacattgtgttgggcaataggctccattagtggagcaatgcatgaagaggacgaaaaacgatttcttgttactgttataaaggatctattaggattatgtgaacagaaaagaggcaaagataataaagctattattgcatcaaatatcatgtacatagtaggtcaatacccacgttttttgagagctcactggaaatttctgaagactgtagttaacaagctgttcgaattcatgcatgagacccatgatggagtccaggatatggcttgtgatactttcattaaaatagcccaaaaatgccgcaggcatttcgttcaggttcaggttggagaagtgatgccatttattgatgaaattttgaacaacattaacactattatttgtgatcttcagcctcaacaggttcatacgttttatgaagctgtggggtacatgattggtgcacaaacagatcaaacagtacaagaacacttgatagaaaagtacatgttactccctaatcaagtgtgggatagtataatccagcaggcaaccaaaaatgtggatatactgaaagatcctgaaacagtcaagcagcttggtagcattttgaaaacaaatgtgagagcctgcaaagctgttggacacccctttgtaattcagcttggaagaatttatttagatatgcttaatgtatacaagtgcctcagtgaaaatatttctgcagctatccaagctaatggtgaaatggttacaaagcaaccattgattagaagtatgcgaactgtaaaaagggaaactttaaagttaatatctggttgggtgagccgatccaatgatccacagatggtcgctgaaaattttgttccccctctgttggatgcagttctcattgattatcagagaaatgtcccagctgctagagaaccagaagtgcttagtactatggccataattgtcaacaagttagggggacatataacagctgaaatacctcaaatatttgatgctgtttttgaatgcacattgaatatgataaataaggactttgaagaatatcctgaacatagaacgaactttttcttactacttcaggctgtcaattctcattgtttcccagcattccttgctattccacctacacagtttaaacttgttttggattccatcatttgggctttcaaacatactatgaggaatgtcgcagatacgggcttacagatactttttacactcttacaaaatgttgcacaagaagaagctgcagctcagagtttttatcaaacttatttttgtgatattctccagcatatcttttctgttgtgacagacacttcacatactgctggtttaacaatgcatgcatcaattcttgcatatatgtttaatttggttgaagaaggaaaaataagtacatcattaaatcctggaaatccagttaacaaccaaatctttcttcaggaatatgtggctaatctccttaagtcggccttccctcacctacaagatgctcaagtaaagctctttgtgacagggcttttcagcttaaatcaagatattcctgctttcaaggaacatttaagagatttcctagttcaaataaaggaatttgcaggtgaagacacttctgatttgtttttggaagagagagaaatagccctacggcaggctgatgaagagaaacataaacgtcaaatgtctgtccctggcatctttaatccacatgagattccagaagaaatgtgtgattaaaatccaaattcatgctgttttttttctctgcaactcgttagcagaggaaaacagcatgtgggtatttgtcgaccaaaatgatgccaatttgtaaattaaaatgtcacctagtggccctttttcttatgtgtttttttgtataagaaattttctgtgaaatatccttccattgtttaagcttttgttttggtcatctttatttagtttgcatgaagttgaaaattaaggcatttttaaaaattttacttcatgcccatttttgtggctgggctggggggaggaggcaaattcgatttgaacatatacttgtaattctaatgcaaaattatacaatttttcctgtaaacaataccaatttttaattagggagcattttccttctagtctatttcagcctagaagaaaagataatgagtaaaacaaattgcgttgtttaaaggattatagtgctgcattgtctgaagttagcacctcttggactgaatcgtttgtctagactacatgtattacaaagtctctttggcaagattgcagcaagatcatgtgcatatcatcccattgtaaagcgacttcaaaaatatgggaacacagttagttatttttacacagttctttttgtttttgtgtgtgtgtgctgtcgcttgtcgacaacagctttttgttttcctcaatgaggagtgttgctcatttgtgagccttcattaactcgaagtgaaatggttaaaaatatttatcctgttagaataggctgcatctttttaacaactcattaaaaaacaaaacaactctggcttttgagatgacttatactaatttacattgtttaccaagctgtagtgctttaagaacactacttaaaaagcaaaataaacttggtttacattta

SEQ ID NO: 108 - DNA, 2500 bp, Homo sapiens
  mRNA (1)..(2500): gi|4557844|ref|NM_001034.1| Homo sapiens ribonucleotide reductase M2 polypeptide (RRM2)
cccaggcgcagccaatgggaagggtcggaggcatggcacagccaatgggaagggccggggcaccaaagccaatgggaagggccgggagcgcgcggcgcgggagatttaaaggctgctggagtgaggggtcgcccgtgcaccctgtcccagccgtcctgtcctggctgctcgctctgcttcgctgcgcctccactatgctctccctccgtgtcccgctcgcgcccatcacggacccgcagcagctgcagctctcgccgctgaaggggctcagcttggtcgacaaggagaacacgccgccggccctgagcgggacccgcgtcctggccagcaagaccgcgaggaggatcttccaggagcccacggagccgaaaactaaagcagctgcccccggcgtggaggatgagccgctgctgagagaaaacccccgccgctttgtcatcttccccatcgagtaccatgatatctggcagatgtataagaaggcagaggcttccttttggaccgccgaggaggttgacctctccaaggacattcagcactgggaatccctgaaacccgaggagagatattttatatcccatgttctggctttctttgcagcaagcgatggcatagtaaatgaaaacttggtggagcgatttagccaagaagttcagattacagaagcccgctgtttctatggcttccaaattgccatggaaaacatacattctgaaatgtatagtcttcttattgacacttacataaaagatcccaaagaaagggaatttctcttcaatgccattgaaacgatgccttgtgtcaagaagaaggcagactgggccttgcgctggattggggacaaagaggctacctatggtgaacgtgttgtagcctttgctgcagtggaaggcattttcttttccggttcttttgcgtcgatattctggctcaagaaacgaggactgatgcctggcctcacattttctaatgaacttattagcagagatgagggtttacactgtgattttgcttgcctgatgttcaaacacctggtacacaaaccatcggaggagagagtaagagaaataattatcaatgctgttcggatagaacaggagttcctcactgaggccttgcctgtgaagctcattgggatgaattgcactctaatgaagcaatacattgagtttgtggcagacagacttatgctggaactgggttttagcaaggttttcagagtagagaacccatttgactttatggagaatatttcactggaaggaaagactaacttctttgagaagagagtaggcgagtatcagaggatgggagtgatgtcaagtccaacagagaattcttttaccttggatgctgacttctaaatgaactgaagatgtgcccttacttggctgattttttttttccatctcataagaaaaatcagctgaagtgttaccaactagccacaccatgaattgtccgtaatgttcattaacagcatctttaaaactgtgtagctacctcacaaccagtcctgtctgtttatagtgctggtagtatcaccttttgccagaaggcctggctggctgtgacttaccatagcagtgacaatggcagtcttggctttaaagtgaggggtgaccctttagtgagcttagcacagcgggattaaacagtcctttaaccagcacagccagttaaaagatgcagcctcactgcttcaacgcagattttaatgtttacttaaatataaacctggcactttacaaacaaataaacattgttttgtactcacggcggcgataatagcttgatttatttggtttctacaccaaatacattctcctgaccactaatgggagccaattcacaattcactaagtgactaaagtaagttaaacttgtgtagactaagcatgtaatttttaagttttattttaatgaattaaaatatttgttaaccaactttaaagtcagtcctgtgtatacctagatattagtcagttggtgccagatagaagacaggttgtgtttttatcctgtggcttgtgtagtgtcctgggattctctgccccctctgagtagagtgttgtgggataaaggaatctctcagggcaaggagcttcttaagttaaatcactagaaatttaggggtgatctgggccttcatatgtgtgagaagccgtttcattttatttctcactgtattttcctcaacgtctggttgatgagaaaaaattcttgaagagttttcatatgtgggagctaaggtagtattgtaaaatttcaagtcatccttaaacaaaatgatccacctaagatcttgcccctgttaagtggtgaaatcaactagaggtggttcctacaagttgttcattctagttttgtttggtgtaagtaggttgtgtgagttaattcatttatatttactatgtctgttaaatcagaaattttttattatctatgttcttctagattttacctgtagttcataaaaaaaaaaaaaaaaaaaaaaaaa

SEQ ID NO: 109 - DNA, 4153 bp, Homo sapiens
  mRNA (1)..(4153): gi|50659094|ref|NM_004728.2| Homo sapiens DEAD (Asp-Glu-Ala-Asp) box polypeptide 21 (DDX21)
acgagagccgggtggacccagggtggggaactacctcttcctctccacgcggttgagaagaccggtcggcctgggcaacctgcgctgaagatgccgggaaaactccgtagtgacgctggtttggaatcagacaccgcaatgaaaaaaggggagacactgcgaaagcaaaccgaggagaaagagaaaaaagagaagccaaaatctgataagactgaagagatagcagaagaggaagaaactgttttccccaaagctaaacaagttaaaaagaaagcagagccttctgaagttgacatgaattctcctaaatccaaaaaggcaaaaaagaaagaggagccatctcaaaatgacatttctcctaaaaccaaaagtttgagaaagaaaaaggagcccattgaaaagaaagtggtttcttctaaaaccaaaaaagtgacaaaaaatgaggagccttctgaggaagaaatagatgctcctaagcccaagaagatgaagaaagaaaaggaaatgaatggagaaactagagagaaaagccccaaactgaagaatggatttcctcatcctgaaccggactgtaaccccagtgaagctgccagtgaagaaagtaacagtgagatagagcaggaaatacctgtggaacaaaaagaaggcgctttctctaattttcccatatctgaagaaactattaaacttctcaaaggccgaggagtgaccttcctatttcctatacaagcaaagacattccatcatgtttacagcgggaaggacttaattgcacaggcacggacaggaactgggaagacattctcctttgccatccctttgattgagaaacttcatggggaactgcaagacaggaagagaggccgtgcccctcaggtactggttcttgcacctacaagagagttggcaaatcaagtaagcaaagacttcagtgacatcacaaaaaagctgtcagtggcttgtttttatggtggaactccctatggaggtcaatttgaacgcatgaggaatgggattgatatcctggttggaacaccaggtcgtatcaaagaccacatacagaatggcaaactagatctcaccaaacttaagcatgttgtcctggatgaagtggaccagatgttggatatgggatttgctgatcaagtggaagagattttaagtgtggcatacaagaaagattctgaagacaatccccaaacattgcttttttctgcaacttgccctcattgggtatttaatgttgccaagaaatacatgaaatctacatatgaacaggtggacctgattggtaaaaagactcagaaaacggcaataactgtggagcatctggctattaagtgccactggactcagagggcagcagttattggggatgtcatccgagtatatagtggtcatcaaggacgcactatcatcttttgtgaaaccaagaaagaagcccaggagctgtcccagaattcagctataaagcaggatgctcagtccttgcatggagacattccacagaagcaaagggaaatcaccctgaaaggttttagaaatggtagttttggagttttggtggcaaccaatgttgctgcacgtgggttagacatccctgaggttgatttggttatacaaagctctccaccaaaggatgtagagtcctacattcatcgatccgggcggacaggcagagctggaaggacgggggtgtgcatctgcttttatcagcacaaggaagaatatcagttagtacaagtggagcaaaaagcgggaattaagttcaaacgaataggtgttccttctgcaacagaaataataaaagcttccagcaaagatgccatcaggcttttggattccgtgcctcccactgccattagtcacttcaaacaatcagctgagaagctgatagaggagaagggagctgtggaagctctggcagcagcactggcccatatttcaggtgccacgtccgtagaccagcgctccttgatcaactcaaatgtgggttttgtgaccatgatcttgcagtgctcaattgaaatgccaaatattagttatgcttggaaagaacttaaagagcagctgggcgaggagattgattccaaagtgaagggaatggtttttctcaaaggaaagctgggtgtttgctttgatgtacctaccgcatcagtaacagaaatacaggagaaatggcatgattcacgacgctggcagctctctgtggccacagagcaaccagaactggaaggaccacgggaaggatatggaggcttcaggggacagcgggaaggcagtcgaggcttcaggggacagcgggacggaaacagaagattcagaggacagcgggaaggcagtagaggcccgagaggacagcgatcaggaggtggcaacaaaagtaacagatcccaaaacaaaggccagaagcggagtttcagtaaagcatttggtcaataattagaaatagaagatttatatagcaaaaagagaatgatgtttggcaatatagaactgaacattatttttcatgcaaagttaaaagcacattgtgcctccttttgaccacttgccaagtccctgtctctttcagacacagacaagcttcatttaaattatttcatctgatcattatcatttataactttattgttacttcttcatcagtttttccttttgaaaggtgtatgaattcattacatttttattctaatgtattatctgtagattagaagataaaatcaagcatgtatctgcctatactttgtgagttcacctgtctttatactcaaaagtgtcccttaatagtgtccttccctgaaataaatacctaagggagtgtaacagtctctggaggaccactttgagcctttggaagttaaggtttcctcagccacctgccgaacagtttctcatgtggtcctattatttgtctactgagacttaatactgagcaatgttttgaaacaagatttcaaactaatctgggttgtaatacagtttataccagtgtatgctctagacttggaagatgtagtatgtttgatgtggattacctatacttatgttcgttttgatacatttttagcttctcattataaggtgattcatgctttagtgaattcttcatagatagtatatataaaagtacattttaatagaaagccagggttttaaggaatttcacatgtataaggtggctccatagctttatttgtaagtaggctggataaatggtgcttaaatggtaatgtactccacttcttcctattggaagattaacattatttaccaagaaggacttaagggagtagggggcgcagattagcattgctcaagagtatgtaaaaaaaaaaaaaaaaaaaaagaaccaaaccactggaaataatcaaatgcaaaaaggtaacaaattcataactggaaagcaaagagaagaacaagtatgatttggatgataaagcattgttttaatggtgaaaacttcacagatcactaatgtttctagaggttaacttcaagtgggcaagctggggtttttaggtagtcagtggcctagttcctaaagccacagtataggatctgttaaactgaatgtctgttgaaagtttgttttagctgcttggaggcttccttttaagacaaactgtatgtgattaagttgttttgagggaactgaagaacctgatgtagcccctggccagataactgcctgatttctcagatattatttctctgggaaacattctacatagcacaggagcttaagagtggcattatcttctcgccttaatttccagagattatttctgtactgagaatcctggaactactatgctaggaaatttaaagctgcatggtctgtcttgttttcatttaattattgtgaatacctagaatctttcttggtcctgatttctcttgcttaatccagtctttatctctaactgccccttatttgatcaccatgtactaggagctctgatagccagctcagctcctaatccttgaggcaacattctttttctatttgaacttcagttctgtccttgaatcccgactagatatttcttgccctctggtctcagaattctcttggcttttattccttgatccacttgccagttttatcactttacccttgttcctcatggcttcccatcaagccatgggt

SEQ ID NO: 110 - DNA, 7224 bp, Homo sapiens
  mRNA (1)..(7224): gi|30315657|ref|NM_178313.1| Homo sapiens spectrin, beta, non-erythrocytic 1 (SPTBN1), transcript variant 2
ggtgtgcgcgctgcgcccgcgagctcccgggctcggcaaccgtggcatgcttaggattggccatatttaaaagttctgaagtagaacctgcgcctcctctctgcttctccctcctcctcagtaatttatttcgagcttccaggcaagggccacggaagaagggaaagcaagaaactagatgcctgtgtggtaactcctcgcggagctaaggtggactctcttgcagccaacttcccatcagatcaccttgctggacttgcagaccggaatggggctcgcctaaggagccgagcgctgcggaggctgctgcgtgttggatgggagtgggagggggctggagcgagatttccagggcgcagtcctccggggcgttacgccgggcataatggaattgcagaggacgtctagtatctccgggccgctgtcgccggcgtacacggggcaggtgccttacaactacaaccagctggaaggcagattcaagcagctgcaagatgagcgtgaagccgtgcagaagaagaccttcaccaagtgggtcaattcccaccttgcccgtgtgtcctgccggatcacagacctgtacactgaccttcgagatggacggatgctcatcaagctgctggaggtcctctctggagagaggctgcctaaacccaccaagggacgaatgcgcatccactgcttagagaatgtggacaaggcccttcagttcctgaaggagcagagagtccatcttgagaacatggggtcccatgacatcgtggatggaaaccaccggctgacccttggcctcatctggaccatcatcctgcgcttccagatccaggatatcagtgtggaaactgaagacaacaaagagaagaaatctgccaaggatgcattgctgttgtggtgccagatgaagacagctgggtaccccaatgtcaacattcacaatttcaccactagctggagggacggcatggccttcaatgcactgatacacaaacaccggcctgacctgatagattttgacaaactaaagaaatctaacgcacactacaacctgcagaatgcatttaatctggcagaacagcacctcggcctcactaaactgttggaccccgaagacatcagcgtggaccatcctgatgagaagtccataatcacttatgtggtgacttattaccactacttctctaagatgaaggccttagctgttgaaggaaaacgaattggaaaggtgcttgacaatgctattgaaacagaaaaaatgattgaaaagtatgaatcacttgcctctgaccttctggaatggattgaacaaaccatcatcattctgaacaatcgcaaatttgccaattcactggtcggggttcaacagcagcttcaggcattcaacacttaccgcactgtggagaaaccacccaaatttactgagaaggggaacttggaagtgctgctcttcaccattcagagcaagatgagggccaacaaccagaaggtctacatgccccgggaggggaagctcatctctgacatcaacaaggcctgggaaagactggaaaaagcggaacacgaaagagaactggctttgcggaatgagctcataagacaggagaaactggaacagctcgcccgcagatttgatcgcaaggcagctatgagggagacttggctgagcgaaaaccagcgtctggtgtctcaggacaactttgggtttgaccttcctgcagttgaggccgccacaaaaaagcacgaggccattgagacagacattgccgcatacgaggagcgtgtgcaggctgtggtagccgtggccagggagctcgaggccgagaattaccacgacatcaagcgcatcacagcgaggaaggacaatgtcatccggctctgggaatacctactggaactgctcagggcccggagacagcggctcgagatgaacctggggctgcagaagatattccaggaaatgctctacattatggactggatggatgaaatgaaggtgctagtattgtctcaagactatggcaaacacttacttggtgtggaagacctgttacagaagcacaccctggttgaagcagacattggcatccaggcagagcgggtgagaggtgtcaatgcctccgcccagaagttcgcaacagacggggaaggttacaagccctgtgacccccaggtgatccgagaccgcgtggcccacatggagttctgttatcaagagctttgccagctggcggctgagcgcagggcccgtctggaagagtcccgccgcctctggaagttcttctgggagatggcagaagaggaaggctggatacgggagaaggagaagatcctgtcctcggacgattacgggaaagacctgaccagcgtcatgcgcctgctcagcaagcaccgggcgttcgaggacgagatgagcggccgcagtggccactttgagcaggccatcaaggaaggcgaagacatgatcgcggaggagcacttcgggtcggagaagatccgtgagaggatcatttacatccgggagcagtgggccaacctagagcagctctcggccattcggaagaagcgcctggaggaggcctccctgctgcaccagttccaggcagatgctgatgacattgatgcctggatgctggacatcctcaagattgtctccagcagcgacgtgggccacgatgagtattccacacagtctctggtcaagaaacacaaggacgtggcggaagagatcgccaattacaggcccacccttgacacgctgcacgaacaagccagcgccctcccccaggagcatgccgagtctccagacgtgaggggcaggctgtcgggcatcgaggagcggtataaggaggtggcagagctgacgcggctgcggaagcaggcactccaggacactctggccctgtacaagatgttcagcgaggctgatgcctgtgagctctggatcgacgagaaggagcagtggctcaacaacatgcagatcccagagaagctggaggatctggaggtcatccagcacagatttgagagcctagaaccagaaatgaacaaccaggcttcccgggttgcagtggtgaaccagattgcacgccagctgatgcacagcggccacccaagtgagaaggaaatcaaagcccagcaggacaaactcaacacaaggtggagccagttcagagaactggttgacaggaagaaggatgccctcctgtctgccctgagcatccagaactaccacctcgagtgcaatgaaaccaaatcctggattcgggaaaagaccaaggtcatcgagtccacccaggacctgggcaatgacctggctggcgtcatggccctgcagcgcaagctgaccggcatggagcgggacttggtggccattgaggcaaagctgagtgacctgcagaaggaggcggagaagctggagtccgagcaccccgaccaggcccaggccatcctgtctcggctggccgagatcagcgacgtgtgggaggagatgaagaccaccctgaaaaaccgagaggcctccctgggagaggccagcaagctgcagcagttcctacgggacttggacgacttccagtcctggctctctaggacccagacagcgatcgcctcggaggacatgccaaacaccctgaccgaggctgagaagctgctcacgcagcacgagaacatcaagaatgagatcgacaactacgaggaggactaccagaagatgagggacatgggcgagatggtcacccaggggcagaccgatgcccagtacatgtttctgcggcagcggctgcaggccctggacactggatggaacgagctccacaagatgtgggagaacagacaaaatctcctatcccagtcacatgcctaccagcagttcctcagagacacgaagcaagccgaagcctttcttaacaaccaggagtatgttctggctcacactgaaatgcctaccaccttggaaggagctgaagcagcaattaaaaagcaagaggacttcatgaccaccatggacgccaatgaggagaagatcaatgctgtggtggagactggccggaggctggtgagcgatgggaacatcaactcagatcgcatccaggagaaggtggactctattgatgacagacataggaagaatcgtgagacagccagtgaacttttgatgaggttgaaggacaacagggatctacagaaattcctgcaagattgtcaagagctgtctctctggatcaatgagaagatgctcacagcccaggacatgtcttacgatgaagccagaaatctgcacagtaaatggttgaagcatcaagcatttatggcagaacttgcatccaacaaagaatggcttgacaaaatcgagaaggaaggaatgcagctcatttcagaaaagcctgagacggaagctgtggtgaaggagaaactcactggtttacataaaatgtgggaagtccttgaatccactacccagacaaaggcccagcggctctttgatgcaaacaaggccgaacttttcacccagagctgtgcagatctagacaaatggctgcacggcctggagagtcagattcagtctgatgactatggcaaacacctgaccagtgtcaatatcctgctgaaaaagcaacagatgctggagaatcagatggaagtgcggaagaaggagatcgaagagctccaaagccaagcccaggccctgagtcaggaagggaagagcaccgacgaggtagacagcaagcgcctcaccgtgcagaccaagttcatggagttgctggagcccttgaacgagaggaagcataacctgctggcctccaaagagatccatcagttcaacagggatgtggaggacgagatcttgtgggttggagagaggatgcctttggcaacttccacggatcatggccacaacctccagactgtgcagctgttaataaagaaaaatcagaccctccagaaagaaatccaggggcaccagcctcgcattgacgacatctttgagaggagccaaaacatcgtcactgacagcagcagcctcagcgctgaggccatcagacagaggcttgccgacctgaagcagctgtggggtctcctcattgaggagacagagaaacgccacaggcggctggaggaggcgcacagggcccagcagtactactttgacgctgctgaggccgaagcctggatgagcgagcaggagctgtacatgatgtcagaggagaaggccaaggatgagcagagtgctgtctccatgttgaagaagcaccagatcttagaacaagctgtggaggactatgcagagaccgtgcatcagctctccaagaccagccgggccctggtggccgacagccatcctgaaagtgagcgcattagcatgcggcagtccaaagtggataaactgtacgctggtctgaaagaccttgctgaagagagaagaggcaagctggatgagagacacaggttattccagctcaaccgggaggtggacgacctggagcagtggatcgctgagagggaggtggtcgcagggtcccatgaactgggacaggactatgagcatgtcacgatgttacaagaacgattccgggagtttgcccgagacaccgggaacattgggcaggagcgcgtggacacggtcaatcacctggcagatgagctcatcaactctggacattcagatgccgccaccatcgctgaatggaaggatggcctcaatgaagcctgggccgacctcctggagctcattgacacaagaacacagattcttgccgcttcctatgaactgcacaagttttaccacgatgccaaggagatctttgggcgtatacaggacaaacacaagaaactccctgaggagcttgggagagatcagaacacagtggagaccttacagagaatgcacactacatttgagcatgacatccaggctctgggcacacaggtgaggcagctgcaggaggatgcagcccgcctccaggcggcctatgcgggtgacaaggccgacgatatccagaagcgcgagaacgaggtcctggaagcctggaagtccctcctggacgcctgtgagagccgcagggtgcggctggtggacacaggggacaagttccgcttcttcagcatggtgcgcgacctcatgctctggatggaggatgtcatccggcagatcgaggcccaggagaagccaagggatgtatcatctgttgaactcttaatgaataatcatcaaggcatcaaagctgaaattgatgcacgtaatgacagtttcacaacctgcattgaacttgggaaatccctgttggcgagaaaacactatgcatctgaggagatcaaggaaaaattactgcagttgacggaaaagaggaaagaaatgatcgacaagtgggaagaccgatgggaatggttaagactgattctggaggtccatcagttctcaagagacgccagtgtggccgaggcctggctgcttggacaggagccgtacctatccagccgagagataggccagagcgtggacgaggtggagaagctcatcaagcgccacgaggcatttgaaaagtctgcagcaacctgggatgagaggttctctgccctggaaaggctgactacattggagttactggaagtgcgcagacagcaagaggaagaggagaggaagaggcggccgccttctcccgagccgagcacgaaggtttcagaggaagccgagtcccagcagcagtgggatacttcaaaaggagaacaagtttcccaaaacggtttgccagctgaacagggatctccacgggttagttaccgctctcaaacctaccaaaactacaaaaactttaatagcagacggacagccagtgaccagccatggtctggactgtgaagtttactaccatttgtcaagaatcaccctttccaaatcctctgggttttgactttttggcttccacttcacccaaaatgttaaaatttttacttaattcatagccttccttggtttcatatttgtttgcatttaattcatgtttgagtctcttaactgatggatgcccacttgccttaaagcagcatacttattttttgtttatttattgtgagctttttactttattaagattttacagcgaaacccttacatgagtaattgaaatgaaattaaatgagattacagcataatgaagaagacaactagaatctaacaggtatgacacattcagttattctaacagggcacagtactgtgctatatgtagc

SEQ ID NO: 111 - DNA, 3805 bp, Homo sapiens
  mRNA (1)..(3805): gi|27262644|ref|NM_145714.1| Homo sapiens ataxin 2-like (ATXN2L), transcript variant B
tccgcggtcttctctctccacccccgacaccgcggggctccccccgcccgcccacggcgggccccggctgcccgatccccctcgcttcccgcgctctccagcggggccccagccccggccccctctctccctcccttctctctaattccccttccggacgctgccatcatgttgaagcctcagccgctacaacagccctcccagccccagcagccgccccccacgcaacaggccgtggcccgtcggccccccgggggcaccagccctcccaacggcggcctcccggggccgctggccacctctgcggctcctcccgggcctccagcggccgcctccccctgcctggggcctgtggccgctgccgggagcgggctccgccggggagccgaaggcatcttggcgccgcagccgccgccgccgcagcaacaccaggagaggccgggggcagccgccatcggcagcgccaggggacagagcacaggaaagggacccccacagtcacctgtgtttgaaggcgtctacaacaattccagaatgctgcatttccttacagctgttgtgggctccacttgtgatgtaaaggtgaaaaatggtaccacttatgagggtatcttcaagacgctaagctcaaagtttgaactagccgtggatgctgtgcaccggaaagcatctgagccagcaggtggccctcgtcgggaggacattgtggacaccatggtgtttaagccaagtgatgtcatgcttgttcacttccgaaatgttgacttcaactatgctactaaagacaagttcaccgattcagccattgccatgaactcgaaagtgaatggggaacacaaagagaaggtgcttcagcgctgggaggggggtgacagcaacagcgacgactatgacctcgagtctgacatgtccaatggatgggaccccaatgaaatgttcaagttcaatgaggagaactacggtgtgaagactacctatgatagcagtctttcttcttatacggtgcccttagaaaaggacaactcagaagagtttcgtcagcgagagctgcgtgcggcccagttggctcgagagattgaatcaagcccccagtaccgcctacggatcgccatggagaacgacgatgggcgcactgaagaggagaagcacagtgcagtccagcggcagggctcagggcgggagagccccagcttggcatccagggaggggaagtatatccctctgcctcaacgagtccgggaaggtccccggggaggagttcgatgcagcagctctcggggcggtcggcctggccttagctctttgccacctcgtggccctcaccatctggacaacagcagccctggcccaggttctgaggcccgtggtatcaatggaggcccttcccgcatgtccccaaaggcacagcggcctctgagaggtgccaagactctgtcttcgcccagtaataggccttctggagaaacttctgttccacctcctcctgcagtgggccggatgtatcccccgcgttctcccaagtctgctgcccctgccccaatctcagcttcctgtccagagcctcccatcggctcggcagtgccaacctcttcagcctccatccctgtgacctcatcagtctcagatcctggagtgggctccatttctccagcttctccaaagatctccctggcccccacagatgtaaaagaactctctaccaaggaacctgggagaactctggagccccaggagctggctcggatagctgggaaagtccctggtcttcagaatgaacagaaacgattccaactggaagaactgagaaagtttggggcccagtttaagcttcagcccagtagctcccctgagaacagcctggatccttttcctccccggatcttaaaggaggagcccaaaggaaaggagaaagaggttgatggtctgttgacttcagagcccatggggtctcccgtctcctccaagacagagtccgtatcggataaggaggacaaaccacccctggcaccatcaggaggcactgaggggccagagcagcccccaccaccttgtccaagccaaactggcagccccccggtgggcctcatcaagggagaagacaaagatgagggccctgttgctgaacaagtaaagaaatcaacgttgaaccctaatgctaaggagttcaatcctacaaagcctctgctgtctgtgaataaatccaccagtaccccaacttctccggggccccggactcattcaactccctccatcccggtgctgacagcaggccagagtgggctatacagcccccagtacatctcctacatacctcagatccacatgggaccagctgtgcaggcacctcagatgtatccatatcctgtatccaattcagtgcctgggcagcagggcaagtaccggggagcaaaaggctcccttcctccgcagcgctcggaccaacaccagccagcctcagccccgccgatgatgcaggccgccgcggctgctggcccgcctctggtggctgccacgccctattcttcctacatcccctacaaccctcagcagttcccaggccagccagccatgatgcagcccatggcccactacccctcacagccggtgtttgcccccatgcttcagagcaacccacgcatgctgacgtcgggcagccatccccaggccatcgtgtcatcctctacccctcagtacccttctgcagagcagcctaccccccaagccctttatgccactgttcaccagtcctacccacaccatgccacacagctccatgcccaccagccgcagccggctaccacgcctactggaagccagccgcagtcccagcatgcggcccccagtcctgtccagcatcaggcggggcaggccccacacttgggcagtggacagccacagcagaatctgtaccacccaggggccctgacaggcacgccgccctctctgccaccgggaccttctgcccagtcccctcagagcagcttcccccagccagccgctgtgtatgccatccaccaccagcagctgccccacggcttcaccaacatggcccatgttacccaggcccatgtccaaactggaatcacagcagccccgccccctcaccctggggctccccacccgccccaggtgatgctgctgcacccaccccagagtcatggggggcccccccaaggcgcggtgccccagagtggggtgcctgcactctcagcttccacaccctcaccctacccctacatcggacacccccaaggtgagcagcctggccaggcgcctggatttccaggaggagccgatgacaggattcctccccttccaccccccggggaactgaagattgtcctggccgcgacctgagacctccatgagtggagggaagagtgatctatgtctcttcccccagcagctcggaccactcccagccccccatccccccgttccccaggggagctggggaattcctgccaagcaccttgaatgggaggggcctcacagagggcagggccagggtccagcaggggtggggggttcctgctctgcccctgcccgtccccacccagtcttgccctcccatcctctcatctattcccccgctggagacggaagatcttttattttctattatttataacttcagacttgggccccctgttctttctttcccattaacttgagtgacctgtgtgagagacagacagatgccccacgaggatggctggacaaggacttttactttttattacataaaaatattaaaaaataaataaaaaaaataaaattttaaactaaaaaaaaaaaaaaaaaa

SEQ ID NO: 112 - DNA, 2328 bp, Homo sapiens
  mRNA (1)..(2328): gi|16936527|ref|NM_001798.2| Homo sapiens cyclin-dependent kinase 2 (CDK2), transcript variant 1
ggaagcagggcggggcctctggtggcggtcgggaactcggtgggaggcggcaacattgtttcaagttggccaaattgacaagagcgagaggtatactgcgttccatcccgacccggggccacggtactgggccctgtttccccctcctcggcccccgagagccagggtccgccttctgcagggttcccaggcccccgctccagggccgggctgacccgactcgctggcgcttcatggagaacttccaaaaggtggaaaagatcggagagggcacgtacggagttgtgtacaaagccagaaacaagttgacgggagaggtggtggcgcttaagaaaatccgcctggacactgagactgagggtgtgcccagtactgccatccgagagatctctctgcttaaggagcttaaccatcctaatattgtcaagctgctggatgtcattcacacagaaaataaactctacctggtttttgaatttctgcaccaagatctcaagaaattcatggatgcctctgctctcactggcattcctcttcccctcatcaagagctatctgttccagctgctccagggcctagctttctgccattctcatcgggtcctccaccgagaccttaaacctcagaatctgcttattaacacagagggggccatcaagctagcagactttggactagccagagcttttggagtccctgttcgtacttacacccatgaggtggtgaccctgtggtaccgagctcctgaaatcctcctgggctgcaaatattattccacagctgtggacatctggagcctgggctgcatctttgctgagatggtgactcgccgggccctattccctggagattctgagattgaccagctcttccggatctttcggactctggggaccccagatgaggtggtgtggccaggagttacttctatgcctgattacaagccaagtttccccaagtgggcccggcaagattttagtaaagttgtacctcccctggatgaagatggacggagcttgttatcgcaaatgctgcactacgaccctaacaagcggatttcggccaaggcagccctggctcaccctttcttccaggatgtgaccaagccagtaccccatcttcgactctgatagccttcttgaagcccccagccctaatctcaccctctcctccagtgtgggcttgaccaggcttggccttgggctatttggactcaggtgggccctctgaacttgccttaaacactcaccttctagtcttggccagccaactctgggaatacaggggtgaaaggggggaaccagtgaaaatgaaaggaagtttcagtattagatgcacttaagttagcctccaccaccctttcccccttctcttagttattgctgaagagggttggtataaaaataattttaaaaaagccttcctacacgttagatttgccgtaccaatctctgaatgccccataattattatttccagtgtttgggatgaccaggatcccaagcctcctgctgccacaatgtttataaaggccaaatgatagcgggggctaagttggtgcttttgagaaccaagtaaaacaaaaccactgggaggagtctattttaaagaattcggttgaaaaaatagatccaatcagtttataccctagttagtgttttgcctcacctaataggctgggagactgaagactcagcccgggtggggctgcagaaaaatgattggccccagtccccttgtttgtcccttctacaggcatgaggaatctgggaggccctgagacagggattgtgcttcattccaatctattgcttcaccatggccttatgaggcaggtgagagatgtttgaatttttctcttccttttagtattcttagttgttcagttgccaaggatccctgatcccattttcctctgacgtccacctcctaccccataggagttagaagttagggtttaggcatcattttgagaatgctgacactttttcagggctgtgattgagtgagggcatgggtaaaaatatttctttaaaagaaggatgaacaattatatttatatttcaggttatatccaatagtagagttggcttttttttttttttttttggtcatagtgggtggatttgttgccatgtgcaccttggggttttgtaatgacagtgctaaaaaaaaaaaagcatttttttttatgatttgtctctgtcacccttgtccttgagtgctcttgctattaacgttatttgtaatttagtttgtagctcattaaaaaaatgtgcctagttttataaaaaaaaaaaaaaaaaaaaaaaaaaaaaaaaaaaaaaa

SEQ ID NO: 113 - DNA, 3812 bp, Homo sapiens
  mRNA (1)..(3812): gi|31077210|ref|NM_181054.1| Homo sapiens hypoxia-inducible factor 1, alpha subunit (basic helix-loop-helix transcription factor) (HIF1A), transcript variant 2
gtgctgcctcgtctgaggggacaggaggatcaccctcttcgtcgcttcggccagtgtgtcgggctgggccctgacaagccacctgaggagaggctcggagccgggcccggaccccggcgattgccgcccgcttctctctagtctcacgaggggtttcccgcctcgcacccccacctctggacttgcctttccttctcttctccgcgtgtggagggagccagcgcttaggccggagcgagcctgggggccgcccgccgtgaagacatcgcggggaccgattcaccatggagggcgccggcggcgcgaacgacaagaaaaagataagttctgaacgtcgaaaagaaaagtctcgagatgcagccagatctcggcgaagtaaagaatctgaagttttttatgagcttgctcatcagttgccacttccacataatgtgagttcgcatcttgataaggcctctgtgatgaggcttaccatcagctatttgcgtgtgaggaaacttctggatgctggtgatttggatattgaagatgacatgaaagcacagatgaattgcttttatttgaaagccttggatggttttgttatggttctcacagatgatggtgacatgatttacatttctgataatgtgaacaaatacatgggattaactcagtttgaactaactggacacagtgtgtttgattttactcatccatgtgaccatgaggaaatgagagaaatgcttacacacagaaatggccttgtgaaaaagggtaaagaacaaaacacacagcgaagcttttttctcagaatgaagtgtaccctaactagccgaggaagaactatgaacataaagtctgcaacatggaaggtattgcactgcacaggccacattcacgtatatgataccaacagtaaccaacctcagtgtgggtataagaaaccacctatgacctgcttggtgctgatttgtgaacccattcctcacccatcaaatattgaaattcctttagatagcaagactttcctcagtcgacacagcctggatatgaaattttcttattgtgatgaaagaattaccgaattgatgggatatgagccagaagaacttttaggccgctcaatttatgaatattatcatgctttggactctgatcatctgaccaaaactcatcatgatatgtttactaaaggacaagtcaccacaggacagtacaggatgcttgccaaaagaggtggatatgtctgggttgaaactcaagcaactgtcatatataacaccaagaattctcaaccacagtgcattgtatgtgtgaattacgttgtgagtggtattattcagcacgacttgattttctcccttcaacaaacagaatgtgtccttaaaccggttgaatcttcagatatgaaaatgactcagctattcaccaaagttgaatcagaagatacaagtagcctctttgacaaacttaagaaggaacctgatgctttaactttgctggccccagccgctggagacacaatcatatctttagattttggcagcaacgacacagaaactgatgaccagcaacttgaggaagtaccattatataatgatgtaatgctcccctcacccaacgaaaaattacagaatataaatttggcaatgtctccattacccaccgctgaaacgccaaagccacttcgaagtagtgctgaccctgcactcaatcaagaagttgcattaaaattagaaccaaatccagagtcactggaactttcttttaccatgccccagattcaggatcagacacctagtccttccgatggaagcactagacaaagttcacctgagcctaatagtcccagtgaatattgtttttatgtggatagtgatatggtcaatgaattcaagttggaattggtagaaaaactttttgctgaagacacagaagcaaagaacccattttctactcaggacacagatttagacttggagatgttagctccctatatcccaatggatgatgacttccagttacgttccttcgatcagttgtcaccattagaaagcagttccgcaagccctgaaagcgcaagtcctcaaagcacagttacagtattccagcagactcaaatacaagaacctactgctaatgccaccactaccactgccaccactgatgaattaaaaacagtgacaaaagaccgtatggaagacattaaaatattgattgcatctccatctcctacccacatacataaagaaactactagtgccacatcatcaccatatagagatactcaaagtcggacagcctcaccaaacagagcaggaaaaggagtcatagaacagacagaaaaatctcatccaagaagccctaacgtgttatctgtcgctttgagtcaaagaactacagttcctgaggaagaactaaatccaaagatactagctttgcagaatgctcagagaaagcgaaaaatggaacatgatggttcactttttcaagcagtaggaattatttagcatgtagactgctggggcaatcaatggatgaaagtggattaccacagctgaccagttatgattgtgaagttaatgctcctatacaaggcagcagaaacctactgcagggtgaagaattactcagagctttggatcaagttaactgagctttttcttaatttcattcctttttttggacactggtggctcactacctaaagcagtctatttatattttctacatctaattttagaagcctggctacaatactgcacaaacttggttagttcaatttttgatcccctttctacttaatttacattaatgctcttttttagtatgttctttaatgctggatcacagacagctcattttctcagttttttggtatttaaaccattgcattgcagtagcatcattttaaaaaatgcacctttttatttatttatttttggctagggagtttatccctttttcgaattatttttaagaagatgccaatataatttttgtaagaaggcagtaacctttcatcatgatcataggcagttgaaaaatttttacaccttttttttcacattttacataaataataatgctttgccagcagtacgtggtagccacaattgcacaatatattttcttaaaaaataccagcagttactcatggaatatattctgcgtttataaaactagtttttaagaagaaattttttttggcctatgaaattgttaaacctggaacatgacattgttaatcatataataatgattcttaaatgctgtatggtttattatttaaatgggtaaagccatttacataatatagaaagatatgcatatatctagaaggtatgtggcatttatttggataaaattctcaattcagagaaatcatctgatgtttctatagtcactttgccagctcaaaagaaaacaataccctatgtagttgtggaagtttatgctaatattgtgtaactgatattaaacctaaatgttctgcctaccctgttggtataaagatattttgagcagactgtaaacaagaaaaaaaaaatcatgcattcttagcaaaattgcctagtatgttaatttgctcaaaatacaatgtttgattttatgcactttgtcgctattaacatcctttttttcatgtagatttcaataattgagtaattttagaagcattattttaggaatatatagttgtcacagtaaatatcttgttttttctatgtacattgtacaaatttttcattccttttgctctttgtggttggatctaacactaactgtattgttttgttacatcaaataaacatcttctgtggaccagg

SEQ ID NO: 114 - DNA, 1273 bp, Homo sapiens
  mRNA (1)..(1273): gi|21359866|ref|NM_001916.2| Homo sapiens cytochrome c-1 (CYC1)
caagatggcggcagctgcggcttcgcttcgcggggtagtgttgggcccgcggggcgcggggctcccgggcgcgcgtgcccggggtctgctgtgcagcgcgcggcccgggcagctcccgctacggacacctcaggcagtggccttgtcgtcgaagtctggcctttcccgaggccggaaagtgatgctgtcagcgctgggcatgctggcggcagggggtgcggggctggccgtggctctgcattcggctgtgagtgccagtgacctggagctgcacccccccagctatccgtggtctcaccgtggcctcctctcttccttggaccacaccagcatccggaggggtttccaggtatataagcaggtgtgcgcctcctgccacagcatggacttcgtggcctaccgccacctggtgggcgtgtgctacacggaggatgaagctaaggagctggctgcggaggtggaggttcaagacggccccaatgaagatggggagatgttcatgcggccagggaagctgttcgactatttcccaaaaccataccccaacagtgaggctgctcgagctgccaacaacggagcattgccccctgacctcagctacatcgtgcgagctaggcatggtggtgaggactacgtcttctccctgctcacgggctactgcgagccacccaccggggtgtcactgcgggaaggtctctacttcaacccctactttcctggccaggccattgccatggcccctcccatctacacagatgtcttagagtttgacgatggcaccccagctaccatgtcccagatagccaaggatgtgtgcaccttcctgcgctgggcatctgagccagagcacgaccatcgaaaacgcatggggctcaagatgttgatgatgatggctctgctggtgcccctggtctacaccataaagcggcacaagtggtcagtcctgaagagtcggaagctggcatatcggccgcccaagtgaccctgtccagtgtctgcttgccatcctgccagaacaggccctcaagcccaagagccatcccaggcctgttcaggcctcagctaagcctctcttcatctggaagaagaggcaagggggcaggagaccaggctctagctctgggccctccttcagcccccatcatgggaataaattaattttctcaatgtaaaaaaaaaaaaaaaaaaaaaaaaaaaaaaaaaaaaaaaaaaaaaaaaaaaaaaaaaaaaaaaaaaaaaaaaaaaaaaaaaaaaaaaaaaaaaaaaaaaaaaa

SEQ ID NO: 115 - DNA, 945 bp, Homo sapiens
  mRNA (1)..(945): gi|4505892|ref|NM_002668.1| Homo sapiens proteolipid protein 2 (colonic epithelium-enriched) (PLP2)
ctgggtgtacagcgtcctcgaaaccacgagcaagtgagcagatcctccgaggcaccagggactccagcccatgccatggcggattctgagcgcctctcggctcctggctgctgggccgcctgcaccaacttctcgcgcactcgaaagggaatcctcctgtttgctgagattatattatgcctggtgatcctgatctgcttcagtgcctccacaccaggctactcctccctgtcggtgattgagatgatccttgctgctattttctttgttgtctacatgtgtgacctgcacaccaagataccattcatcaactggccctggagtgatttcttccgaaccctcatagcggcaatcctctacctgatcacctccattgttgtccttgttgagagaggaaaccactccaaaatcgtcgcaggggtactgggcctaatcgctacgtgcctctttggctatgacgcctatgtcaccttccccgttcggcagccaagacatacagcagcccccactgaccccgcagatggcccggtgtaggcgaacttccctcatttctctctgcaatctgcaaataactcctccattgaaataactcctccccaccccaacaacaacattcccagcagaccaactcccaccccctctttgaggtaaaagtgcctttattgggagacttttgtcttccagcctgccaatcaaccctcctgggtgtggccaccatatgtgtgtgcctaggtcctccttctgcacgatccaataggagacaccagttctgactgaaccatgcccccacctaagtcacaaaatgagggaagtggggagttagatttcagagtccaggccctaggttgggacccactccaaataatctcctcggtgtgggtggtggttctatagagggataaatgaataataaacattgttaaaatataaaaaaaaaaaaaaaaa

SEQ ID NO: 116 - DNA, 1923 bp, Homo sapiens
  mRNA (1)..(1923): gi|16418460|ref|NM_052963.1| Homo sapiens topoisomerase (DNA) I, mitochondrial (TOP1MT), nuclear gene encoding mitochondrial protein
ctttcccggaggctggcagatgcgcgtggtgcggctgctgcggctccgggcggctctgacgctgctcggggaggtcccccgccgcccggcctcccggggtgtcccgggctcgcgcaggacgcagaagggcagtggagccaggtgggagaaggagaagcacgaagacggggtgaagtggagacagctggagcacaagggcccgtacttcgcacccccatacgagccccttcccgacggagtgcgtttcttctatgaaggaaggcctgtgagattgagcgtggcagcggaggaggtcgccactttttatgggaggatgttagatcatgaatacacaacaaaggaggttttccggaagaacttcttcaatgactggcgaaaggaaatggcggtggaagagagggaagtcatcaagagcctggacaagtgtgacttcacggagatccacagatactttgtggacaaggccgcagcccggaaagtcctgagcagggaggagaagcagaagctaaaagaagaggcagaaaaacttcagcaagagttcggctactgtattttagatggtcaccaagaaaaaataggcaacttcaagattgagccgcctggcttgttccgtggccgtggcgaccatcccaagatggggatgctgaagagaaggatcacgccagaggatgtggttatcaactgcagcagggactcgaagatccccgagccgccggcggggcaccagtggaaggaggtgcgctccgataacaccgtcacgtggctggcagcttggaccgagagcgttcagaactccatcaagtacatcatgctgaacccttgctcgaagctgaagggggagacagcttggcagaagtttgaaacagctcgacgcctgcggggatttgtggacgagatccgctcccagtaccgggctgactggaagtctcgggaaatgaagacgagacagcgggcggtggccctgtatttcatcgataagctggcactgagagcaggaaatgagaaggaggacggtgaggcggccgacaccgtgggctgctgttccctccgcgtggagcacgtccagctgcacccggaggccgatggctgccaacacgtggtggaatttgacttcctggggaaggactgcatccgctactacaacagagtgccggtggagaagccggtgtacaagaacttacagctctttatggagaacaaggacccccgggacgacctcttcgacaggctgaccacgaccagcctgaacaagcacctccaggagctgatggacgggctgacggccaaggtgttccggacctacaacgcctccatcactctgcaggagcagctgcgggccctgacgcgcgccgaggacagcatagcagctaagatcttatcctacaaccgagccaaccgagtcgtggccattctctgcaaccatcagcgagcaacccccagtacgttcgagaagtcgatgcagaatctccagacgaagatccaggcaaagaaggagcaggtggctgaggccagggcagagctgaggagggcgagggctgagcacaaagcccaaggggatggcaagtccaggagtgtcctggagaagaagaggcggctcctggagaagctgcaggagcagctggcgcagctgagtgtgcaggccacggacaaggaggagaacaagcaggtggccctgggcacgtccaagctcaactacctggaccccaggatcagcattgcctggtgcaagcggttcagggtgccagtggagaagatctacagcaaaacacagcgggagaggttcgcctgggctctcgccatggcaggagaagactttgaattctaacgacgagccgtgttgaaacttcttttgtatgtgtgtgtgtttttttcactattaaagcagtactggggaattttgtacaataaaaaaaaaaaaaaaaa

SEQ ID NO: 117 - DNA, 1780 bp, Homo sapiens
  mRNA (1)..(1780): gi|14043071|ref|NM_031243.1| Homo sapiens heterogeneous nuclear ribonucleoprotein A2/B1 (HNRPA2B1), transcript variant B1
agtagcagcagcgccgggtcccgtgcggaggtgctcctcgcagagttgtttctcgagcagcggcagttctcactacagcgccaggacgagtccggttcgtgttcgtccgcggagatctctctcatctcgctcggctgcgggaaatcgggctgaagcgactgagtccgcgatggagaaaactttagaaactgttcctttggagaggaaaaagagagaaaaggaacagttccgtaagctctttattggtggcttaagctttgaaaccacagaagaaagtttgaggaactactacgaacaatggggaaagcttacagactgtgtggtaatgagggatcctgcaagcaaaagatcaagaggatttggttttgtaactttttcatccatggctgaggttgatgctgccatggctgcaagacctcattcaattgatgggagagtagttgagccaaaacgtgctgtagcaagagaggaatctggaaaaccaggggctcatgtaactgtgaagaagctgtttgttggcggaattaaagaagatactgaggaacatcaccttagagattactttgaggaatatggaaaaattgataccattgagataattactgataggcagtctggaaagaaaagaggctttggctttgttacttttgatgaccatgatcctgtggataaaatcgtattgcagaaataccataccatcaatggtcataatgcagaagtaagaaaggctttgtctagacaagaaatgcaggaagttcagagttctaggagtggaagaggaggcaactttggctttggggattcacgtggtggcggtggaaatttcggaccaggaccaggaagtaactttagaggaggatctgatggatatggcagtggacgtggatttggggatggctataatgggtatggaggaggacctggaggtggcaattttggaggtagccccggttatggaggaggaagaggaggatatggtggtggaggacctggatatggcaaccagggtgggggctacggaggtggttatgacaactatggaggaggaaattatggaagtggaaattacaatgattttggaaattataaccagcaaccttctaactacggtccaatgaagagtggaaactttggtggtagcaggaacatggggggaccatatggtggaggaaactatggtccaggaggcagtggaggaagtgggggttatggtgggaggagccgatactgagcttcttcctatttgccatgggcttcactgtataaataggagaggatgagagcccagaggtaacagaacagcttcaggttatcgaaataacaatgttaaggaaactcttatctcagtcatgcataaatatgcagtgatatggcagaagacaccagagcagatgcagagagccattttgtgaatggattggattatttaataacattaccttactgtggaggaaggattgtaaaaaaaaatgcctttgagacagtttcttagctttttaattgttgtttctttctagtggtctttgtaagagtgtagaagcattccttctttgataatgttaaatttgtaagtttcaggtgacatgtgaaaccttttttaagatttttctcaaagttttgaaaagctattagccaggatcatggtgtaataagacataacgtttttcctttaaaaaaatttaagtgcgtgtgtagagttaagaagctgttgtacatttatgatttaataaaataattctaaaggaaaaaaaaaaaaaaaaaaaaaaaaaaaaaaaaaaaa

SEQ ID NO: 118 - DNA, 623 bp, Homo sapiens
  mRNA (1)..(623): gi|31657130|ref|NM_002638.2| Homo sapiens peptidase inhibitor 3, skin-derived (SKALP) (PI3)
aggccaagctggactgcataaagattggtatggccttagctcttagccaaacaccttcctgacaccatgagggccagcagcttcttgatcgtggtggtgttcctcatcgctgggacgctggttctagaggcagctgtcacgggagttcctgttaaaggtcaagacactgtcaaaggccgtgttccattcaatggacaagatcccgttaaaggacaagtttcagttaaaggtcaagataaagtcaaagcgcaagagccagtcaaaggtccagtctccactaagcctggctcctgccccattatcttgatccggtgcgccatgttgaatccccctaaccgctgcttgaaagatactgactgcccaggaatcaagaagtgctgtgaaggctcttgcgggatggcctgtttcgttccccagtgagagggagccggtccttgctgcacctgtgccgtccccagagctacaggccccatctggtcctaagtccctgctgcccttccccttcccacactgtccattcttcctcccattcaggatgcccacggctggagctgcctctctcatccactttccaataaagagttccttctgctccaaaaaaaaaaaaaaaaaaaaaaaaaaaa

SEQ ID NO: 119 - DNA, 2825 bp, Homo sapiens
  mRNA (1)..(2825): gi|28416943|ref|NM_003146.2| Homo sapiens structure specific recognition protein 1 (SSRP1)
gtacggcttccggtggcgggacgcggggccgcgcacgcgggaaaagcttccccggtgtccccccatccccctccccgcgccccccccgcgtccccccagcgcgcccacctctcgcgccggggccctcgcgaggccgcagcctgaggagattcccaacctgctgagcatccgcacacccactcaggagttggggcccagctcccagtttacttggtttcccttgtgcagcctggggctctgcccaggccaccacaggcaggggtcgacatggcagagacactggagttcaacgacgtctatcaggaggtgaaaggttccatgaatgatggtcgactgaggttgagccgtcagggcatcatcttcaagaatagcaagacaggcaaagtggacaacatccaggctggggagttaacagaaggtatctggcgccgtgttgctctgggccatggacttaaactgcttacaaagaatggccatgtctacaagtatgatggcttccgagaatcggagtttgagaaactctctgatttcttcaaaactcactatcgccttgagctaatggagaaggacctttgtgtgaagggctggaactgggggacagtgaaatttggtgggcagctgctttcctttgacattggtgaccagccagtctttgagatacccctcagcaatgtgtcccagtgcaccacaggcaagaatgaggtgacactggaattccaccaaaacgatgacgcagaggtgtctctcatggaggtgcgcttctacgtcccacccacccaggaggatggtgtggaccctgttgaggcctttgcccagaatgtgttgtcaaaggcggatgtaatccaggccacgggagatgccatctgcatcttccgggagctgcagtgtctgactcctcgtggtcgttatgacattcggatctaccccacctttctgcacctgcatggcaagacctttgactacaagatcccctacaccacagtactgcgtctgtttttgttaccccacaaggaccagcgccagatgttctttgtgatcagcctggatcccccaatcaagcaaggccaaactcgctaccacttcctgatcctcctcttctccaaggacgaggacatttcgttgactctgaacatgaacgaggaagaagtggagaagcgctttgagggtcggctcaccaagaacatgtcaggatccctctatgagatggtcagccgggtcatgaaagcactggtaaaccgcaagatcacagtgccaggcaacttccaagggcactcaggggcccagtgcattacctgttcctacaaggcaagctcaggactgctctacccgctggagcggggcttcatctacgtccacaagccacctgtgcacatccgcttcgatgagatctcctttgtcaactttgctcgtggtaccactactactcgttcctttgactttgaaattgagaccaagcagggcactcagtataccttcagcagcattgagagggaggagtacgggaaactgtttgattttgtcaacgcgaaaaagctcaacatcaaaaaccgaggattgaaagagggcatgaacccaagctacgatgaatatgctgactctgatgaggaccagcatgatgcctacttggagaggatgaaggaggaaggcaagatccgggaggagaatgccaatgacagcagcgatgactcaggagaagaaaccgatgagtcattcaacccaggtgaagaggaggaagatgtggcagaggagtttgacagcaacgcctctgccagctcctccagtaatgagggtgacagtgaccgggatgagaagaagcggaaacagctcaaaaaggccaagatggccaaggaccgcaagagccgcaagaagcctgtggaggtgaagaagggcaaagaccccaatgcccccaagaggcccatgtctgcatacatgctgtggctcaatgccagccgagagaagatcaagtcagaccatcctggcatcagcatcacggatctttccaagaaggcaggcgagatctggaagggaatgtccaaagagaagaaagaggagtgggatcgcaaggctgaggatgccaggagggactatgaaaaagccatgaaagaatatgaagggggccgaggcgagtcttctaagagggacaagtcaaagaagaagaagaaagtaaaggtaaagatggaaaagaaatccacgccctctaggggctcatcatccaagtcgtcctcaaggcagctaagcgagagcttcaagagcaaagagtttgtgtctagtgatgagagctcttcgggagagaacaagagcaaaaagaagaggaggaggagcgaggactctgaagaagaagaactagccagtactccccccagctcagaggactcagcgtcaggatccgatgagtagaaacggaggaaggttctctttgcgcttgccttctcacaccccccgactccccacccatattttggtaccagtttctcctcatgaaatgcagtccctggattctgtgccatctgaacatgctctcctgttggtgtgtatgtcactagggcagtggggagacgtcttaactctgctgcttcccaaggatggctgtttataatttggggagagatagggtgggaggcagggcaatgcaggatccaaatcctcatcttactttcccgaccttaaggatgtagctgctgcttgtcctgttcaagttgctggagcaggggtcatgtgaggccaggcctgtagctcctacctggggcctatttctactttcattttgtatttctggtctgtgaaaatgatttaataaagggaactgactttggaaaccaaaaaaa

SEQ ID NO: 120 - DNA, 845 bp, Homo sapiens
  mRNA (1)..(845): gi|38455401|ref|NM_005564.2| Homo sapiens lipocalin 2 (oncogene 24p3) (LCN2)
caggtgagcctctcactcgccacctcctcttccacccctgccaggcccagcagccaccacagcgcctgcttcctcggccctgaaatcatgcccctaggtctcctgtggctgggcctagccctgttgggggctctgcatgcccaggcccaggactccacctcagacctgatcccagccccacctctgagcaaggtccctctgcagcagaacttccaggacaaccaattccaggggaagtggtatgtggtaggcctggcagggaatgcaattctcagagaagacaaagacccgcaaaagatgtatgccaccatctatgagctgaaagaagacaagagctacaatgtcacctccgtcctgtttaggaaaaagaagtgtgactactggatcaggacttttgttccaggttgccagcccggcgagttcacgctgggcaacattaagagttaccctggattaacgagttacctcgtccgagtggtgagcaccaactacaaccagcatgctatggtgttcttcaagaaagtttctcaaaacagggagtacttcaagatcaccctctacgggagaaccaaggagctgacttcggaactaaaggagaacttcatccgcttctccaaatctctgggcctccctgaaaaccacatcgtcttccctgtcccaatcgaccagtgtatcgacggctgagtgcacaggtgccgccagctgccgcaccagcccgaacaccattgagggagctgggagaccctccccacagtgccacccatgcagctgctccccaggccaccccgctgatggagccccaccttgtctgctaaataaacatgtgccctcaggccaaaaagaaa

SEQ ID NO: 121 - DNA, 2225 bp, Homo sapiens
  mRNA (1)..(2225): gi|7706484|ref|NM_016292.1| Homo sapiens TNF receptor-associated protein 1 (TRAP1)
cgacatggcgcgcgagctgcgggcgctgctgctgtggggccgccgcctgcggcctttgctgcgggcgccggcgctggcggccgtgccgggaggaaaaccaattctgtgtcctcggaggaccacagcccagttgggccccaggcgaaacccagcctggagcttgcaggcaggacgactgttcagcacgcagaccgccgaggacaaggaggaacccctgcactcgattatcagcagcacagagagcgtgcagggttccacttccaaacatgagttccaggccgagacaaagaagcttttggacattgttgcccggtccctgtactcagaaaaagaggtgtttatacgggagctgatctccaatgccagcgatgccttggaaaaactgcgtcacaaactggtgtctgacggccaagcactgccagaaatggagattcacttgcagaccaatgccgagaaaggcaccatcaccatccaggatactggtatcgggatgacacaggaagagctggtgtccaacctggggacgattgccagatcggggtcaaaggccttcctggatgctctgcagaaccaggctgaggccagcagcaagatcatcggccagtttggagtgggtttctactcagctttcatggtggctgacagagtggaggtctattcccgctcggcagccccggggagcctgggttaccagtggctttcagatggttctggagtgtttgaaatcgccgaagcttcgggagttagaaccgggacaaaaatcatcatccacctgaaatccgactgcaaggagttttccagcgaggcccgggtgcgagatgtggtaacgaagtacagcaacttcgtcagcttccccttgtacttgaatggaaggcggatgaacaccttgcaggccatctggatgatggaccccaaggatgtcggtgagtggcaacatgaggagttctaccgctacgtcgcgcaggctcacgacaagccccgctacaccctgcactataagacggacgcaccgctcaacatccgcagcatcttctacgtgcccgacatgaaaccgtccatgtttgatgtgagccgggagctgggctccagcgttgcactgtacagccgcaaagtcctcatccagaccaaggccacggacatcctgcccaagtggctgcgcttcatccgaggtgtggtggacagtgaggacattcccctgaacctcagccgggagctgctgcaggagagcgcactcatcaggaaactccgggacgttttacagcagaggctgatcaaattcttcattgaccagagtaaaaaagatgctgagaagtatgcaaagttttttgaagattacggcctgttcatgcgggagggcattgtgaccgccaccgagcaggaggtcaaggaggacatagcaaagctgctgcgctacgagtcctcggcgctgccctccgggcagctaaccagcctctcagaatacgccagccgcatgcgggccggcacccgcaacatctactacctgtgcgcccccaaccgtcacctggcagagcactcaccctactatgaggccatgaagaagaaagacacagaggttctcttctgctttgagcagtttgatgagctcaccctgctgcaccttcgtgagtttgacaagaagaagctgatctctgtggagacggacatagtcgtggatcactacaaggaggagaagtttgaggacaggtccccagccgccgagtgcctatcagagaaggagacggaggagctcatggcctggatgagaaatgtgctggggtcgcgtgtcaccaacgtgaaggtgaccctccgactggacacccaccctgccatggtcaccgtgctggagatgggggctgcccgccacttcctgcgcatgcagcagctggccaagacccaggaggagcgcgcacagctcctgcagcccacgctggagatcaaccccaggcacgcgctcatcaagaagctgaatcagctgcgcgcaagcgagcctggcctggctcagctgctggtggatcagatatacgagaacgccatgattgctgctggacttgttgacgaccctagggccatggtgggccgcttgaatgagctgcttgtcaaggccctggagcgacactgacagccagggggccagaaggactgacaccacagatgacagccccacctccttgagctttatttacctaaatttaaaggtatttcttaacccgaaaaaaaaaaaaaaa

SEQ ID NO: 122 - DNA, 4569 bp, Homo sapiens
  mRNA (1)..(4569): gi|82830439|ref|NM_018193.2| Homo sapiens KIAA1794 (KIAA1794)
tcttgttgttacgggtaacggaagtgtggcggcgttgggttgagcgggctttttggaagtttgtggcggagttctgtgatatgagcaacaatggaccagaagattttatctctagcagcagaaaaaacagcagacaaactgcaagaatttcttcaaaccctgagagaaggtgatttgactaatctccttcagaatcaagcagtgaaaggaaaagttgctggagcactcctgagagccatcttcaaaggttccccctgctctgaggaagctggaacacttaggagacgtaagatatacacttgttgtatccagttggtggaatcgggggatttgcagaaagaaatagcgtctgagatcataggattactgatgctggaggctcaccattttccaggaccattattggttgaattagccaatgagtttattagtgctgtcagagaaggcagcctagtgaatggaaaatctttggagttactacctatcattctcactgccctggctacgaaaaaggaaaatctggcttatggaaaaggtgtactgagtggggaagaatgtaagaaacagttgattaacaccctgtgttctggcaggtgggatcagcaatatgtaatccaactcacctccatgttcaaggatgtccctctgactgcagaagaggtggaatttgtggtggaaaaagcattgagcatgttctccaagatgaatcttcaagaaataccacctttggtctatcagcttctggttctctcctccaagggaagcagaaagagtgttttggaaggaatcatagccttcttcagtgcactagataagcagcacaatgaggaacagagtggtgacgagctattggatgttgtcactgtgccatcaggtgaacttcgtcatgtggaaggcaccattattctacacattgtgtttgccatcaaattggactatgaactaggcagagaactcgtgaaacacttaaaggtaggacagcaaggagattccaataataacttaagtcccttcagcattgctcttcttctgtctgtaacaagaatacaaagatttcaggaccaggtgcttgatcttttaaagacttcggttgtaaagagctttaaggatcttcaactcctccaaggctcaaaatttcttcagaatctagttcctcatagatcttatgtttcaaccatgatcttggaagtagtgaagaatagcgttcatagctgggaccatgttactcagggcctcgtagaacttggtttcattttgatggattcatatgggccaaagaaggttcttgatggaaaaactattgaaaccagcccaagtctttctagaatgccaaaccagcatgcatgtaagctcggagctaatatcctgttggaaacttttaagatccatgagatgatcagacaagaaattttggagcaggtcctcaacagggttgttaccagagcatcttctcccatcagtcatttcttagacctgctttcaaatatcgtcatgtatgcacccttagttcttcaaagttgttcttctaaagtcacagaagcttttgactatttgtcctttctgccccttcagactgtacaaaggctgcttaaggcagtgcagccccttctcaaagtcagcatgtcaatgagagactgcttgatacttgtccttcggaaagctatgtttgccaaccagcttgatgcccgaaaatctgcagttgctgggtttttgctgctcctgaagaactttaaagttttaggcagcctgtcatcctctcagtgcagtcagtctctcagtgtcagtcaggttcatgtggatgttcacagccattacaattctgtcgccaatgaaactttttgccttgagatcatggatagtttgaggagatgcttaagccagcaagctgatgttcgactcatgctttatgaggggttttatgatgttcttcgaaggaactctcagctggctaattcagtcatgcaaactctgctctcacagttaaaacagttctatgagccaaaacctgatctgctgcctcctctgaaattagaagcttgtattctgacccaaggagataagatctctctacaagaaccactggattatctgctgtgttgtattcagcattgtttggcctggtataagaatacagtcatacccttacagcagggagaggaggaagaggaggaggaagaggcattctacgaagacctagatgatatattggagtccattactaatagaatgattaagagtgagctggaagactttgaactggataaatcagcagatttttctcagagcaccagtattggcataaaaaataatatctgtgcttttcttgtgatgggagtttgtgaggttttaatagaatacaatttctccataagtagtttcagtaagaataggtttgaggacattctgagcttatttatgtgttacaaaaaactctctgacattcttaatgaaaaagcgggtaaagccaaaactaaaatggccaacaagacaagtgatagtcttttgtccatgaaatttgtgtccagtcttctcactgctcttttcagagtcttgctatggagatacacttcaattcctacttcagtggaagagtcgggaaagaaagagaaaggaaagagcatctcactgctgtgcttggagggtttacagaaaatattcagtgctgtgcaacagttctatcagcccaagattcagcagtttctcagagctctggatgtcacagataaggaaggagaagagagagaagatgcagatgtcagtgtcactcagagaacagcattccagatccggcaatttcagaggtccttgttgaatttacttagcagtcaagaggaagattttaatagcaaagaagccctcctgctagtcacggttcttaccagtttgtccaagttactggagccctcctctcctcagtttgtgcagatgttatcctggacatcaaagatttgcaaggaaaacagccgggaggatgccttgttttgcaagagcttgatgaacttgctcttcagcctgcatgtttcgtataagagtcctgtcattctgctgcgtgacttgtcccaggatatccacgggcatctgggagatatagaccaggatgtagaggtggagaaaacaaaccactttgcaatagtgaatttgagaacggctgcccccactgtctgtttacttgttctgagtcaggccgagaaggttctagaagaagtggactggctaatcaccaagcttaagggacaagtgagccaagaaaccttatcagaagaggcctcttctcaggcaaccctaccaaatcagcctgttgagaaagctatcatcatgcaactgggaactctgcttacatttttccacgagctggtgcagacagctctgccatcaggcagctgtgtggacaccttgttaaaggacttgtgcaaaatgtacaccacacttacagcccttgtcagatattatctccaggtgtgtcagagctccggaggaattccaaaaaatatggaaaagctggtgaagctgtctggttctcatctgacccccctgtgttattctttcatttcttacgtacagaataagagtaagagcctgaactatacgggagagaaaaaggagaaacctgctgccgttgccacagccatggccagagttcttcgggaaaccaagccaatccctaacctcatctttgccatagaacagtatgaaaaatttctcatccacctttctaagaagtccaaggtgaacctgatgcagcacatgaagctcagcacctcacgagacttcaagatcaaaggaaacatcctagacatggttcttcgagaggatggtgaagatgaaaatgaagagggcactgcatcagagcatgggggacagaacaaagaaccagccaagaagaaaaggaaaaaataaatgaaatgcctgagttaatgtgaactttggggcttctgcttcatttttacccaacaagcaacaatgccccttgtcctgtagtccacaccgatgttggcatcttggttctgaacccactgaattcaactgcaccttcagttagaaggaatcttcttggcaggtcctgctactgaaaaatggctggccttaggcaagcccttttgcaaaaagcacagctgaaagcctgagtttgggagcctgcaccaccccgatgaagctccacgggagcaaatacagagcctccaggcagtgctatggtccaggctggcttcgtttttccaaggagcctttggtgagttcaattatctggtaaatatccagcgcttcacctgaaagatagtgcaaattggttaggatgccacctcaagaactgtaactgagagctcagaagtgagcaaaggagcttaatgctaaggtcaaaaggagagtgaaaggttgagaacaattgccacgaacggtaatgttacatgttaggagggtctgttttctttttatataagtgtgtcttagatatattttaaatagaaaataagctttctgatttacttgtttggtatttaaagcacagtttgtttttctgtcacctatagagtgcaagaatgcactctatagaataaattatctttaaacatt

SEQ ID NO: 123 - DNA, 2823 bp, Homo sapiens
  mRNA (1)..(2823): gi|46909589|ref|NM_003815.3| Homo sapiens ADAM metallopeptidase domain 15 (metargidin) (ADAM15), transcript variant 2
gcgcggcgctgctgggttctccgaggcgacctggccgccggccgctcctccgcgcgctgttccgcacttgctgccctcgcccggcccggagcgccgctgccatgcggctggcgctgctctgggccctggggctcctgggcgcgggcagccctctgccttcctggccgctcccaaatataggtggcactgaggagcagcaggcagagtcagagaaggccccgagggagcccttggagccccaggtccttcaggacgatctcccaattagcctcaaaaaggtgcttcagaccagtctgcctgagcccctgaggatcaagttggagctggacggtgacagtcatatcctggagctgctacagaatagggagttggtcccaggccgcccaaccctggtgtggtaccagcccgatggcactcgggtggtcagtgagggacacactttggagaactgctgctaccagggaagagtgcggggatatgcaggctcctgggtgtccatctgcacctgctctgggctcagaggcttggtggtcctgaccccagagagaagctataccctggagcaggggcctggggaccttcagggtcctcccattatttcgcgaatccaagatctccacctgccaggccacacctgtgccctgagctggcgggaatctgtacacactcagaagccaccagagcaccccctgggacagcgccacattcgccggaggcgggatgtggtaacagagaccaagactgtggagttggtgattgtggctgatcactcggaggcccagaaataccgggacttccagcacctgctaaaccgcacactggaagtggccctcttgctggacacattcttccggcccctgaatgtacgagtggcactagtgggcctggaggcctggacccagcgtgacctggtggagatcagcccaaacccagctgtcaccctcgaaaacttcctccactggcgcagggcacatttgctgcctcgattgccccatgacagtgcccagctggtgactggtacttcattctctgggcctacggtgggcatggccattcagaactccatctgttctcctgacttctcaggaggtgtgaacatggaccactccaccagcatcctgggagtcgcctcctccatagcccatgagttgggccacagcctgggcctggaccatgatttgcctgggaatagctgcccctgtccaggtccagccccagccaagacctgcatcatggaggcctccacagacttcctaccaggcctgaacttcagcaactgcagccgacgggccctggagaaagccctcctggatggaatgggcagctgcctcttcgaacggctgcctagcctaccccctatggctgctttctgcggaaatatgtttgtggagccgggcgagcagtgtgactgtggcttcctggatgactgcgtcgatccctgctgtgattctttgacctgccagctgaggccaggtgcacagtgtgcatctgacggaccctgttgtcaaaattgccagctgcgcccgtctggctggcagtgtcgtcctaccagaggggattgtgacttgcctgaattctgcccaggagacagctcccagtgtccccctgatgtcagcctaggggatggcgagccctgcgctggcgggcaagctgtgtgcatgcacgggcgttgtgcctcctatgcccagcagtgccagtcactttggggacctggagcccagcccgctgcgccactttgcctccagacagctaatactcggggaaatgcttttgggagctgtgggcgcaaccccagtggcagttatgtgtcctgcacccctagagatgccatttgtgggcagctccagtgccagacaggtaggacccagcctctgctgggctccatccgggatctactctgggagacaatagatgtgaatgggactgagctgaactgcagctgggtgcacctggacctgggcagtgatgtggcccagcccctcctgactctgcctggcacagcctgtggccctggcctggtgtgtatagaccatcgatgccagcgtgtggatctcctgggggcacaggaatgtcgaagcaaatgccatggacatggggtctgtgacagcaacaggcactgctactgtgaggagggctgggcaccccctgactgcaccactcagctcaaagcaaccagctccctgaccacagggctgctcctcagcctcctggtcttattggtcctggtgatgcttggtgccagctactggtaccgtgcccgcctgcaccagcgactctgccagctcaagggacccacctgccagtacagggcagcccaatctggtccctctgaacggccaggacctccgcagagggccctgctggcacgaggcactaagtctcaggggccagccaagcccccacccccaaggaagccactgcctgccgacccccagggccggtgcccatcgggtgacctgcccggcccaggggctggaatcccgcccctagtggtaccctccagaccagcgccaccgcctccgacagtgtcctcgctctacctctgacctctccggaggttccgctgcctccaagccggacttagggcttcaagaggcgggcgtgccctctggagtcccctaccatgactgaaggcgccagagactggcggtgtcttaagactccgggcaccgccacgcgctgtcaagcaacactctgcggacctgccggcgtagttgcagcgggggcttggggaggggctgggggttggacgggattgaggaaggtccgcacagcctgtctctgctcagttgcaataaacgtgacatcttgggagcgttcaaa

SEQ ID NO: 124 - DNA, 2465 bp, Homo sapiens
  mRNA (1)..(2465): gi|15011921|ref|NM_001363.2| Homo sapiens dyskeratosis congenita 1, dyskerin (DKC1)
gagcagcgcggcctgacgggaccaaggcggcgggagtctgcggtcgttccctcggctgtggaccgggcggcacgcacgcggtgcagggtaacatggcggatgcggaagtaattattttgccaaagaaacataagaagaaaaaggagcggaagtcattgccagaagaagatgtagccgaaatacaacacgctgaagaatttcttatcaaacctgaatccaaagttgctaagttggacacgtctcagtggccccttttgctaaagaattttgataagctgaatgtaaggacaacacactatacacctcttgcatgtggttcaaatcctctgaagagagagattggggactatatcaggacaggtttcattaatcttgacaagccctctaacccctcttcccatgaggtggtagcctggattcgacggatacttcgggtggagaagacagggcacagtggtactctggatcccaaggtgactggttgtttaatcgtgtgcatagaacgagccactcgcttggtgaagtcacaacagagtgcaggcaaagagtatgtggggattgtccggctgcacaatgctattgaaggggggacccagctttctagggccctagaaactctgacaggtgccttattccagcgacccccacttattgctgcagtaaagaggcagctccgagtgaggaccatctacgagagcaaaatgattgaatacgatcctgaaagaagattaggaatcttttgggtgagttgtgaggctggcacctacattcggacattatgtgtgcaccttggtttgttattgggagttggtggtcagatgcaggagcttcggagggttcgttctggagtcatgagtgaaaaggaccacatggtgacaatgcatgatgtgcttgatgctcagtggctgtatgataaccacaaggatgagagttacctgcggcgagttgtttaccctttggaaaagctgttgacatctcataaacggctggttatgaaagacagtgcagtaaatgccatctgctatggggccaagattatgcttccaggtgttcttcgatatgaggacggcattgaggtcaatcaggagattgtggttatcaccaccaaaggagaagcaatctgcatggctattgcattaatgaccacagcggtcatctctacctgcgaccatggtatagtagccaagatcaagagagtgatcatggagagagacacttaccctcggaagtggggtttaggtccaaaggcaagtcagaagaagctgatgatcaagcagggccttctggacaagcatgggaagcccacagacagcacacctgccacctggaagcaggagtatgttgactacagtgagtctgccaaaaaagaggtggttgctgaagtggtaaaagccccgcaggtagttgccgaagcagcaaaaactgcgaagcggaagcgagagagtgagagtgaaagtgacgagactcctccagcagctcctcagttgatcaagaaggaaaagaagaagagtaagaaggacaagaaggccaaagctggtctggagagcggggccgagcctggagatggggacagtgataccaccaagaagaagaagaagaagaagaaagcaaaagaggtagaattggtttctgagtagtgaaggccacttgaagctggaggagaaactaaagccttattgagaaaacatgttatagatccttttgttgctgagagagtggaacataggtcctagacagggtgaagagttctggcacattttagctgctactttgagacctcggtgatgttacctggtgtggtcatcccatcttgtcctgttttaaggatatgggtggtgaaagatgaaagaggcagagtttatcccaatgacttctctgtttgagttgggaagcctcaccttcagacccagtaactgtccgcagctgtctgctagtggttgtcttaacatcgtagtcctagtttgcattttttaaatcccctctgtttaaaaggtttgtaaaacaaaaacaaaaaactaagtctgctcagtgaaatgctgtagaaccctaaataagtggtagaagagtgtcactgaattttgtctctgaattcagtataactgagttttgtccatgctggtgtctgggttataggcctgatgggcctggtagttttccatcttgttctggcctagaggtcagtcctttgcacttcctcaaagcttgtgtacagtgctcacctaaatccatctgactacttgttcctgtgccctcttgttttaggcctcgtttacttttaaaaaatgaaattgttcattgctgggagaagaatgttgtaatttttacttattaaagtcaacttgttaagttttttatgtattcctgttgggttttcttgttgatctcatgctagcagagcaaaaattgtaaaatattttgattaaaaatctagggacctttatgtcctatttggaattcgatatcaa

SEQ ID NO: 125 - DNA, 3676 bp, Homo sapiens
  mRNA (1)..(3676): gi|45594311|ref|NM_032271.2| Homo sapiens TNF receptor-associated factor 7 (TRAF7), transcript variant 1
ggccgagggggcatcatgaagcgggctggcggcgctgccgctcccgggcggccgcgggcgggaggtgcttcccaaggaccgtagatgcctctctagagcatgagctcaggcaagagtgcccgctacaaccgcttctccggggggcccagcaatcttcccaccccagacgtcaccacagggaccagaatggaaacgaccttcggacccgccttttcagccgtcaccaccatcacaaaagctgacgggaccagcacctacaagcagcactgcaggacaccctcctcctccagcacccttgcctactccccgcgggacgaggaggacagcatgccccccatcagcactccccgccgctccgactccgccatctctgtccgctccctgcactcagagtccagcatgtctctgcgctccacattctcactgcccgaggaggaggaggagccggagccactggtgtttgcggagcagccctcggtgaagctgtgctgtcagctctgctgcagcgtcttcaaagaccccgtgatcaccacgtgtgggcacacgttctgtaggagatgcgccttgaagtcagagaagtgtcccgtggacaacgtcaaactgaccgtggtggtgaacaacatcgcggtggccgagcagatcggggagctcttcatccactgccggcacggctgccgggtagcgggcagcgggaagccccccatctttgaggtggacccccgagggtgccccttcaccatcaagctcagcgcccggaaggaccacgagggcagctgtgactacaggcctgtgcggtgtcccaacaaccccagctgccccccgctgctcaggatgaacctggaggcccacctcaaggagtgcgagcacatcaaatgcccccactccaagtacgggtgcacgttcatcgggaaccaggacacttacgagacccacctggagacttgccgcttcgagggcctgaaggagtttctgcagcagacggatgaccgcttccacgagatgcacgtggctctggcccagaaggaccaggagatcgccttcctgcgctccatgctgggaaagctctcggagaagatcgaccagctagagaagagcctggagctcaagtttgacgtcctggacgaaaaccagagcaagctcagcgaggacctcatggagttccggcgggacgcatccatgttaaatgacgagctgtcccacatcaacgcgcggctgaacatgggcatcctaggctcctacgaccctcagcagatcttcaagtgcaaagggacctttgtgggccaccagggccctgtgtggtgtctctgcgtctactccatgggtgacctgctcttcagtggctcctctgacaagaccatcaaggtgtgggacacatgtaccacctacaagtgtcagaagacactggagggccatgatggcatcgtgctggctctctgcatccaggggtgcaaactctacagcggctctgcagactgcaccatcattgtgtgggacatccagaacctgcagaaggtgaacaccatccgggcccatgacaacccggtgtgcacgctggtctcctcacacaacgtgctcttcagcggctccctgaaggccatcaaggtctgggacatcgtgggcactgagctgaagttgaagaaggagctcacaggcctcaaccactgggtgcgggccctggtggctgcccagagctacctgtacagcggctcctaccagacaatcaagatctgggacatccgaacccttgactgcatccacgtcctgcagacgtctggtggcagcgtctactccattgctgtgacaaatcaccacattgtctgtggcacctacgagaacctcatccacgtgtgggacattgagtccaaggagcaggtgcggaccctcacgggccacgtgggcaccgtgtatgccctggcggtcatctcgacgccagaccagaccaaagtcttcagtgcatcctacgaccggtccctcagggtctggagtatggacaacatgatctgcacgcagaccctgctgcgtcaccagggcagtgtcaccgcgctggctgtgtcccggggccgactcttctcaggggctgtggatagcactgtgaaggtttggacttgctaacaggatccaggccaggctgtggtttcccctgaaccagccctggacctttctgagccaggctggccacatggggtggtctcggggtttctgcctgccccgtgggcataggtggacaggctctggcagccgggcagtgccctccccgtcccatgctcggcgagcctccctctactcggcactgtccttgctgcccagcccctctctgggtgccaggtacgacgcttgccccggcccaccctccatccccaccctccatccccaccctagatggagcgagggcctttttactcaccttttctaccgtttttagactgtatgtagatttggttacctcctggttgaaataaatgctccacagactgtggctgtgagtggggacagctcctcgggacaagggggctgtgtgtggccttgaggttggtgtgcacaggcactggctgctgtgagtgggggggcatggggcagtttcctttggtggaccccaggacttcggcccactccggggcctcccctccctgctaggaggcaactcgtcacacccaagctgctggcctccagtcccatctcccccaacacatgtgcccccaaaaagtgagccaggcacctctgtttcctgctgtttattgacagccgacggcagcgccttgcccagacctcccctgcccacctgctggagcccagcctgtgccgccctctgaggagaggcctggggggacagctgggcacgtccactcgcagggaaacacggggtgagacagcaggaaggggccctgcacgccgggacgccacctccgccagccgcctccacccgccccacaccacaatcgctggttttcggcattttttaaattttttttttaagaaacgtcaaagttgtgcccaacactgtggatcagcaaacacgatagaggagaccagtcagtacttcttggagggggcaggaggagagaggaaaagggagggcgagaatgaccacacaacacagccttggaccatgagcagaagcgtccgtgggaactccactggggtggatgggctgcctgcacagcccctggagagggggccaggcacaccctcagaggagctgcaagcccgtggcctggcctgctacatgccctgcttccacgtggctgccacgctgacacacccacattcaccaaacccacccgcgccctgggacgcagccacgccaggaggaggacacggccgccgagagcaaggcacaacctcgagttcttggggcgcagagaacttaggagagaagcacggaggagcccccggcagagcacccgcccccgggccccagccttccacctgtgctagcagcctggggcctccactctggccggaggaaggaccgcaggcagacagcctgggcctctaacagcttttgtccggagctagacttcgtgtcctttcagttggtaaatggttttctatagaatcaataatatttctttctttaaatatatatttgttaaagttatacctttttgtttctctggggaaatccgcctcagctcattcccaataaattaatactcttgatagcttaaaaaaaaaa

SEQ ID NO: 126 - DNA, 3416 bp, Homo sapiens
  mRNA (1)..(3416): gi|73765543|ref|NM_000314.3| Homo sapiens phosphatase and tensin homolog (mutated in multiple advanced cancers 1) (PTEN)
cctcccctcgcccggcgcggtcccgtccgcctctcgctcgcctcccgcctcccctcggtcttccgaggcgcccgggctcccggcgcggcggcggagggggcgggcaggccggcgggcggtgatgtggcgggactctttatgcgctgcggcaggatacgcgctcggcgctgggacgcgactgcgctcagttctctcctctcggaagctgcagccatgatggaagtttgagagttgagccgctgtgaggcgaggccgggctcaggcgagggagatgagagacggcggcggccgcggcccggagcccctctcagcgcctgtgagcagccgcgggggcagcgccctcggggagccggccggcctgcggcggcggcagcggcggcgtttctcgcctcctcttcgtcttttctaaccgtgcagcctcttcctcggcttctcctgaaagggaaggtggaagccgtgggctcgggcgggagccggctgaggcgcggcggcggcggcggcacctcccgctcctggagcgggggggagaagcggcggcggcggcggccgcggcggctgcagctccagggagggggtctgagtcgcctgtcaccatttccagggctgggaacgccggagagttggtctctccccttctactgcctccaacacggcggcggcggcggcggcacatccagggacccgggccggttttaaacctcccgtccgccgccgccgcaccccccgtggcccgggctccggaggccgccggcggaggcagccgttcggaggattattcgtcttctccccattccgctgccgccgctgccaggcctctggctgctgaggagaagcaggcccagtcgctgcaaccatccagcagccgccgcagcagccattacccggctgcggtccagagccaagcggcggcagagcgaggggcatcagctaccgccaagtccagagccatttccatcctgcagaagaagccccgccaccagcagcttctgccatctctctcctcctttttcttcagccacaggctcccagacatgacagccatcatcaaagagatcgttagcagaaacaaaaggagatatcaagaggatggattcgacttagacttgacctatatttatccaaacattattgctatgggatttcctgcagaaagacttgaaggcgtatacaggaacaatattgatgatgtagtaaggtttttggattcaaagcataaaaaccattacaagatatacaatctttgtgctgaaagacattatgacaccgccaaatttaattgcagagttgcacaatatccttttgaagaccataacccaccacagctagaacttatcaaacccttttgtgaagatcttgaccaatggctaagtgaagatgacaatcatgttgcagcaattcactgtaaagctggaaagggacgaactggtgtaatgatatgtgcatatttattacatcggggcaaatttttaaaggcacaagaggccctagatttctatggggaagtaaggaccagagacaaaaagggagtaactattcccagtcagaggcgctatgtgtattattatagctacctgttaaagaatcatctggattatagaccagtggcactgttgtttcacaagatgatgtttgaaactattccaatgttcagtggcggaacttgcaatcctcagtttgtggtctgccagctaaaggtgaagatatattcctccaattcaggacccacacgacgggaagacaagttcatgtactttgagttccctcagccgttacctgtgtgtggtgatatcaaagtagagttcttccacaaacagaacaagatgctaaaaaaggacaaaatgtttcacttttgggtaaatacattcttcataccaggaccagaggaaacctcagaaaaagtagaaaatggaagtctatgtgatcaagaaatcgatagcatttgcagtatagagcgtgcagataatgacaaggaatatctagtacttactttaacaaaaaatgatcttgacaaagcaaataaagacaaagccaaccgatacttttctccaaattttaaggtgaagctgtacttcacaaaaacagtagaggagccgtcaaatccagaggctagcagttcaacttctgtaacaccagatgttagtgacaatgaacctgatcattatagatattctgacaccactgactctgatccagagaatgaaccttttgatgaagatcagcatacacaaattacaaaagtctgaatttttttttatcaagagggataaaacaccatgaaaataaacttgaataaactgaaaatggacctttttttttttaatggcaataggacattgtgtcagattaccagttataggaacaattctcttttcctgaccaatcttgttttaccctatacatccacagggttttgacacttgttgtccagttgaaaaaaggttgtgtagctgtgtcatgtatatacctttttgtgtcaaaaggacatttaaaattcaattaggattaataaagatggcactttcccgttttattccagttttataaaaagtggagacagactgatgtgtatacgtaggaattttttccttttgtgttctgtcaccaactgaagtggctaaagagctttgtgatatactggttcacatcctacccctttgcacttgtggcaacagataagtttgcagttggctaagagaggtttccgaagggttttgctacattctaatgcatgtattcgggttaggggaatggagggaatgctcagaaaggaaataattttatgctggactctggaccatataccatctccagctatttacacacacctttctttagcatgctacagttattaatctggacattcgaggaattggccgctgtcactgcttgttgtttgcgcatttttttttaaagcatattggtgctagaaaaggcagctaaaggaagtgaatctgtattggggtacaggaatgaaccttctgcaacatcttaagatccacaaatgaagggatataaaaataatgtcataggtaagaaacacagcaacaatgacttaaccatataaatgtggaggctatcaacaaagaatgggcttgaaacattataaaaattgacaatgatttattaaatatgttttctcaattgtaacgacttctccatctcctgtgtaatcaaggccagtgctaaaattcagatgctgttagtacctacatcagtcaacaacttacacttattttactagttttcaatcataatacctgctgtggatgcttcatgtgctgcctgcaagcttcttttttctcattaaatataaaatattttgtaatgctgcacagaaattttcaatttgagattctacagtaagcgttttttttctttgaagatttatgatgcacttattcaatagctgtcagccg

SEQ ID NO: 127 - DNA, 4420 bp, Homo sapiens
  mRNA (1)..(4420): gi|38569422|ref|NM_198830.1| Homo sapiens ATP citrate lyase (ACLY), transcript variant 2
agccgatgggggcggggaaaagtccggctgggccgggacaaaagccggatcccgggaagctaccggctgctggggtgctccggattttgcggggttcgtcgggcctgtggaagaagcgccgcgcacggacttcggcagaggtagagcaggtctctctgcagccatgtcggccaaggcaatttcagagcagacgggcaaagaactcctttacaagttcatctgtaccacctcagccatccagaatcggttcaagtatgctcgggtcactcctgacacagactgggcccgcttgctgcaggaccacccctggctgctcagccagaacttggtagtcaagccagaccagctgatcaaacgtcgtggaaaacttggtctcgttggggtcaacctcactctggatggggtcaagtcctggctgaagccacggctgggacaggaagccacagttggcaaggccacaggcttcctcaagaactttctgatcgagcccttcgtcccccacagtcaggctgaggagttctatgtctgcatctatgccacccgagaaggggactacgtcctgttccaccacgaggggggtgtggacgtgggtgatgtggacgccaaggcccagaagctgcttgttggcgtggatgagaaactgaatcctgaggacatcaaaaaacacctgttggtccacgcccctgaagacaagaaagaaattctggccagttttatctccggcctcttcaatttctacgaggacttgtacttcacctacctcgagatcaatccccttgtagtgaccaaagatggagtctatgtccttgacttggcggccaaggtggacgccactgccgactacatctgcaaagtgaagtggggtgacatcgagttccctccccccttcgggcgggaggcatatccagaggaagcctacattgcagacctcgatgccaaaagtggggcaagcctgaagctgaccttgctgaaccccaaagggaggatctggaccatggtggccgggggtggcgcctctgtcgtgtacagcgataccatctgtgatctagggggtgtcaacgagctggcaaactatggggagtactcaggcgcccccagcgagcagcagacctatgactatgccaagactatcctctccctcatgacccgagagaagcacccagatggcaagatcctcatcattggaggcagcatcgcaaacttcaccaacgtggctgccacgttcaagggcatcgtgagagcaattcgagattaccagggccccctgaaggagcacgaagtcacaatctttgtccgaagaggtggccccaactatcaggagggcttacgggtgatgggagaagtcgggaagaccactgggatccccatccatgtctttggcacagagactcacatgacggccattgtgggcatggccctgggccaccggcccatccccaaccagccacccacagcggcccacactgcaaacttcctcctcaacgccagcgggagcacatcgacgccagcccccagcaggacagcatctttttctgagtccagggccgatgaggtggcgcctgcaaagaaggccaagcctgccatgccacaaggaaagagcaccaccctcttcagccgccacaccaaggccattgtgtggggcatgcagacccgggccgtgcaaggcatgctggactttgactatgtctgctcccgagacgagccctcagtggctgccatggtctaccctttcactggggaccacaagcagaagttttactgggggcacaaagagatcctgatccctgtcttcaagaacatggctgatgccatgaggaagcatccggaggtagatgtgctcatcaactttgcctctctccgctctgcctatgacagcaccatggagaccatgaactatgcccagatccggaccatcgccatcatagctgaaggcatccctgaggccctcacgagaaagctgatcaagaaggcggaccagaagggagtgaccatcatcggacctgccactgttggaggcatcaagcctgggtgctttaagattggcaacacaggtgggatgctggacaacatcctggcctccaaactgtaccgcccaggcagcgtggcctatgtctcacgttccggaggcatgtccaacgagctcaacaatatcatctctcggaccacggatggcgtctatgagggcgtggccattggtggggacaggtacccgggctccacattcatggatcatgtgttacgctatcaggacactccaggagtcaaaatgattgtggttcttggagagattgggggcactgaggaatataagatttgccggggcatcaaggagggccgcctcactaagcccatcgtctgctggtgcatcgggacgtgtgccaccatgttctcctctgaggtccagtttggccatgctggagcttgtgccaaccaggcttctgaaactgcagtagccaagaaccaggctttgaaggaagcaggagtgtttgtgccccggagctttgatgagcttggagagatcatccagtctgtatacgaagatctcgtggccaatggagtcattgtacctgcccaggaggtgccgcccccaaccgtgcccatggactactcctgggccagggagcttggtttgatccgcaaacctgcctcgttcatgaccagcatctgcgatgagcgaggacaggagctcatctacgcgggcatgcccatcactgaggtcttcaaggaagagatgggcattggcggggtcctcggcctcctctggttccagaaaaggttgcctaagtactcttgccagttcattgagatgtgtctgatggtgacagctgatcacgggccagccgtctctggagcccacaacaccatcatttgtgcgcgagctgggaaagacctggtctccagcctcacctcggggctgctcaccatcggggatcggtttgggggtgccttggatgcagcagccaagatgttcagtaaagcctttgacagtggcattatccccatggagtttgtgaacaagatgaagaaggaagggaagctgatcatgggcattggtcaccgagtgaagtcgataaacaacccagacatgcgagtgcagatcctcaaagattacgtcaggcagcacttccctgccactcctctgctcgattatgcactggaagtagagaagattaccacctcgaagaagccaaatcttatcctgaatgtagatggtctcatcggagtcgcatttgtagacatgcttagaaactgtgggtcctttactcgggaggaagctgatgaatatattgacattggagccctcaatggcatctttgtgctgggaaggagtatggggttcattggacactatcttgatcagaagaggctgaagcaggggctgtatcgtcatccgtgggatgatatttcatatgttcttccggaacacatgagcatgtaacagagccaggaaccctactgcagtaaactgaagacaagatctcttcccccaagaaaaagtgtacagacagctggcagtggagcctgctttatttagcaggggcctggaatgtaaacagccactggggtacaggcaccgaagaccaacatccacaggctaacaccccttcagtccacacaaagaagcttcatattttttttataagcatagaaataaaaaccaagccaatatttgtgactttgctctgctacctgctgtatttattatatggaagcatctaagtactgtcaggatggggtcttcctcattgtagggcgttaggatgttgctttctttttccattagttaaacatttttttctcctttggaggaagggaatgaaacatttatggcctcaagatactatacatttaaagcaccccaatgtctctctttttttttttttacttccctttcttcttccttatataacatgaagaacattgtattaatctgatttttaaagatctttttgtatgttacgtgttaagggcttgtttggtatcccactgaaatgttctgtgttgcagaccagagtctgtttatgtcagggggatggggccattgcatccttagccattgtcacaaaatatgtggagtagtaacttaatatgtaaagttgtaacatacatacatttaaaatggaaatgcagaaagctgtgaaatgtcttgtgtcttatgttctctgtatttatgcagctgatttgtctgtctgtaactgaagtgtgggtccaaggactcctaactactttgcatctgtaatccacaaagattctgggcagctgccacctcagtctcttctctgtattatcatagtctggtttaaataaactatatagtaacaaaaaaaaaaaaaaaaaaaaaaaaaaaaaaaaaaaaaaaaaaaaaaaaaaaaaaaaaaaaaaaaaaaaaaaaaaaaaaaaaaaaaaaaaaaaaaaaaaa

SEQ ID NO: 128 - DNA, 4537 bp, Homo sapiens
  mRNA (1)..(4537): gi|14670349|ref|NM_032999.1| Homo sapiens general transcription factor II, i (GTF2I), transcript variant 1
aggaggaggagggtgagagagaagctgggagagcagagaaaaggggccaccggtcgcccccccgcttccccgcacgcgctctccagccgcggccgcccgcctgccgcggtcaccccggcctctgcctctgtcccccagtgatcggatcaaggcgctgagcgaggccctgcctgcggggcggccatgcggcggtgacaggagcgcgaccgacacgcacgggcccctcgccccctctcgcctcccgtccgctcgccagctcccctcagccgaggctgctccgcggcggccgcagcccgcgcgcggcccacactcgcctcccctcggcacccccggccccggagctgcctggaggcggccgcactcggggatcatggcccaagttgcaatgtccaccctccccgttgaagatgaggagtcctcggagagcaggatggtggtgacattcctcatgtcagctctcgagtccatgtgtaaagaactggccaagtccaaagccgaagtggcctgcattgcagtgtatgaaacagacgtgtttgtcgtcggaactgaaagaggacgtgcttttgtcaataccagaaaggattttcaaaaagattttgtaaaatattgtgttgaagaagaagaaaaagctgcagagatgcataaaatgaaatctacaacccaggcaaatcggatgagtgtagatgctgtagaaattgaaacactcagaaaaacagttgaggactatttctgcttttgctatgggaaagctttaggcaaatccacagtggtacctgtaccatatgagaagatgctgcgagaccagtcggctgtggtagtgcaggggcttccggaaggtgttgcctttaaacaccccgagaactatgatcttgcaaccctgaaatggattttggagaacaaagcagggatttcattcatcattaagagaccttttttagagccaaagaagcatgtaggtggtcgtgtgatggtaacagatgctgacaggtcaatactatctccaggtggaagttgtggccccatcaaagtgaaaactgaacccacagaagattctggcatttccctggaaatggcagctgtgacagtaaaggaagaatcagaagatcctgattattatcaatataacattcaagcaggcccttctgaaactgatgatgttgatgaaaaacagcccctatcgaagcctttgcaaggaagccaccattcttcagagggcaatgaaggcacagaaatggaagtaccagcagaagattctactcaacatgtcccttcagaaacaagtgaggaccctgaagttgaggtgactattgaagatgatgattattctccaccgtctaagagaccaaaggccaatgagctaccgcagccaccagtcccggaacccgccaatgctgggaagcggaaagtgagggagttcaacttcgagaaatggaatgctcgcatcactgatctacgtaaacaagttgaagaattgtttgaaaggaaatatgctcaagccataaaagccaaaggtccggtgacgatcccgtaccctcttttccagtctcatgttgaagatctttatgtagaaggacttcctgaaggaattccttttagaaggccatctacttacggaattcctcgcctggagaggatattacttgcaaaggaaaggattcgttttgtgattaagaaacatgagcttctgaattcaacacgtgaagatttacagcttgataagccagcttcaggagtaaaggaagaatggtatgccagaatcactaaattaagaaagatggtggatcagcttttctgcaaaaaatttgcggaagccttggggagcactgaagccaaggctgtaccgtaccaaaaatttgaggcacacccgaatgatctgtacgtggaaggactgccagaaaacattcctttccgaagtccctcatggtatggaatcccaaggctggaaaaaatcattcaagtgggcaatcgaattaaatttgttattaaaagaccagaacttctgactcacagtaccactgaagttactcagccaagaacgaatacaccagtcaaggaagattggaatgtcagaattaccaagctacggaagcaagtggaagagatttttaatttgaaatttgctcaagctcttggactcaccgaggcagtaaaagtaccatatcctgtgtttgaatcaaacccggagttcttgtatgtggaaggcttgccagaggggattcccttccgaagccctacctggtttggaattccacgacttgaaaggatcgtccgcgggagtaataaaatcaagttcgttgttaaaaaacctgaactagttatttcctacttgcctcctgggatggctagtaaaataaacactaaagctttgcagtcccccaaaagaccacgaagtcctgggagtaattcaaaggttcctgaaattgaggtcaccgtggaaggccctaataacaacaatcctcaaacctcagctgttcgaaccccgacccagactaacggttctaacgttcccttcaagccacgagggagagagttttcctttgaggcctggaatgccaaaatcacggacctaaaacagaaagttgaaaatctcttcaatgagaaatgtggggaagctcttggccttaaacaagctgtgaaggtgccgttcgcgttatttgagtctttcccggaagacttttatgtggaaggcttacctgagggtgtgccattccgaagaccatcgacttttggcattccgaggctggagaagatactcagaaacaaagccaaaattaagttcatcattaaaaagcccgaaatgtttgagacggcgattaaggagagcacctcctctaagagccctcccagaaaaataaattcatcacccaatgttaatactactgcatcaggtgttgaagaccttaacatcattcaggtgacaattccagatgatgataatgaaagactctcgaaagttgaaaaagctagacagctaagagaacaagtgaatgacctctttagtcggaaatttggtgaagctattggtatgggttttcctgtgaaagttccctacaggaaaatcacaattaaccctggctgtgtggtggttgatggcatgcccccgggggtgtccttcaaagcccccagctacctggaaatcagctccatgagaaggatcttagactctgccgagtttatcaaattcacggtcattagaccatttccaggacttgtgattaataaccagctggttgatcagagtgagtcagaaggccccgtgatacaagaatcagctgaaccaagccagttggaagttccagccacagaagaaataaaagagactgatggaagctctcagatcaagcaagaaccagaccccacgtggtagacctcttccctcctaggcttaaagtatcagtggttgagaagagcttttcggacctgttactaccccaagctgtgtaatatacttgtataacagaaataccttctatacaaacctttttttctacttttagatagaaatgtctactttttcagcagttctgtgaattaaagagcagagtgactgtgggtctggaatggctggtgtacttgggaatgtactatcaggattttacagcaatgctgggaaatgacagggaaaatgacaggaatgaatctcaccagattttttatgtactcagcagagccttgagttacggtgtttattttccaatcaagtgaagatatctcctacttctcctactggaacatctcagcttctgcagtgaagaaaaattcctgtgatagttcagttctttagtttttctatttgaaaaaaaaaaatcatttaaatgatcctttgttcacggctctccttaatgactgagtgaacagttcctatctgtatatttgactaaaccttttcctaagctatctctcatggttcctatgtttttttatcataattaaaagcaaaaccatctggatcacctaacagtcagaggtcagtatctcagcgtgtgaattatagaggaaatacagagagaacctcttccacttttacttttcgtccaaataaaatgcatggtgtaccagaagttgaagatcgggttgaggattggggctagctcgatgacactaaggccccaacatcgcgggacctgctgtggcgcggattcttaggaacgctgttctagccggccccctctccaggggtcgcgtggccggcattatttcctagttcttcttgtaaccctgaggtgccagcgcggggagtgaggaggggtcagggggctaaggatgcaacctctgacgttctgcgccttcctaggagagtcttacatgtgttgagatttcacaagcaatgcgagttgtaaaataccagctctacaagaagctaggctctgtgacggcatagttttcagtagctttatcacaatattcacaatggagaattatatgacatggtagcagaaataggcccttttatgtgttgcttctattttacctcaaattgtagatatagggtaatcaataaaatccatccatgcctttcacacactaaaaagtcgga

SEQ ID NO: 129 - DNA, 3421 bp, Homo sapiens
  mRNA (1)..(3421): gi|55956897|ref|NM_015935.4| Homo sapiens KIAA0859 (KIAA0859), transcript variant 1
gagttgggctgggccggccgacgaatcacgaggcttcgcacccggatatggttatgggctcggaaatctagttcgggaaaagtgtgaggggctcttcacgtggggaaggaacagcaggcgcggaggagggggcaagcgtgtgtgagattcagtggtccatgcgtgcgtttgtcgtgtaagggtcattcctggggtttggagtgggggaacaaatcaatgtggctgtttttccgtggaaagaattcccactgcagtgtcccggagcctgcgtgtggtgggcaagctcctcaaatggtatctcacagggaataggggagtcttgaaaacgcagcttcggcagtaggaacatgaacctcttacctaaaagttccagggagtttggctccgttgactattgggagaagttcttccagcagcgaggaaagaaagctttcgagtggtatggaacctacctggaactgtgcggggtgctacataaatatatcaagcccagggaaaaggtgctggtgattgggtgtggcaactcagaactgagtgagcaactgtatgatgtgggctatcgggatatagtgaacatcgacatcagtgaggttgtcatcaagcaaatgaaggaatgtaatgccacccgacggccccagatgagcttcttgaagatggacatgacgcagatggagtttcctgatgcctcgttccaggtggtgttggacaagggcaccctggatgctgtcctgacagatgaggaagagaagaccttacaacaggtggacaggatgctggctgaggttggccgtgtcctgcaggtgggcggtcgctatctctgcatctccctggctcaggctcacatcctgaagaaagcagtgggccacttctcccgggaggggtggatggtgagggtgcaccaagtggccaacagccaggaccaggtgttggaagcagagcctcagttctccttgcctgtctttgccttcatcatgaccaagttcaggccagtccctggctctgcccttcagatctttgagctgtgtgctcaggagcagcgcaagcctgtgcggctggagagtgccgagcggctggccgaggcggtgcaggagcgacagcagtatgcctggctgtgcagccagctgcgccgcaaggccaggctggggagtgtgtctctggacttgtgcgatggggacacgggggagccacgctacaccctccacgtggtggacagccccactgtgaaaccatcgcgggacaatcattttgcgattttcatcatccctcagggccgggagaccgagtggctctttggcatggatgagggccggaaacagctggcggccagtgctggcttcaggaggttgattacagtggcccttcaccgaggtcagcagtatgaaagcatggaccacatccaagctgagctgtcggctagagtcatggagctggccccagctgggatgcccacccagcagcaggtcccctttctgtctgtgggtggggacattggggtccggaccgttcagcaccaagactgcagccccttgagcggtgactatgtcattgaggatgtgcaaggggatgacaagcgatacttccgtcgactgatcttcctcagcaacaggaatgtggtgcagtccgaagccaggttgctgaaggatgtgtctcacaaagcccagaagaagcggaaaaaggacaggaagaagcagcggcctgctgatgcggaggacctccctgcagccccggggcagtccattgataagagttacctgtgttgtgaacaccacaaagccatgatcgctggccttgccctgctgagaaacccagagctactcctagagatcccactggcattgttggtggtaggcctgggcgggggcagcctccccctctttgtccacgatcattttccaaagtcctgcattgatgctgtggagatcgatccctccatgttggaagtggccacccagtggtttggcttctcccagagtgaccgaatgaaggtccacattgcagatggcctggactatatcgccagcttggcaggaggaggagaagcacggccttgctacgatgtcataatgtttgatgttgacagtaaggacccaacactgggaatgagttgtccgcccccagcatttgtggagcaatcttttctacagaaggttaaaagcatcttgactcctgaaggtgtttttattctcaaccttgtgtgccgagacttggggctaaaagactcagtgctggctgggctcaaggcagtgttccccctcctatatgtccggcgaattgagggtgaagtgaatgagatcctgttctgtcagctgcaccctgagcaaaaacttgccacaccagagctcctagaaacagcccaggctttggagcggaccctgaggaagcctgggaggggttgggatgacacgtatgtcttgtcagatatgctcaagacggtgaaaattgtgtgactgcttaggccaagcagccctcctgcctagactgaccttggactcccagcctgccagagaatgaagaaatacaacgcacagtacttttgaagcttcgtatttttcttggtttcacactcagctacatgtgacctccagcttggtgaggttgcctgaagattagggaaaataaaaatgtccttcccatcttgtcctcttcagtaccacttgggttggtttgtctttgcttcctacaccacgtccttgagtggagttccctgctgaagcccctagcacacactgcatgccttaacaagtgtgtgcaagcccctcagaactcaagacatccaaattttattgcgtctctacttatactggtttgcttttgatttattcctctattagttctataggagtgatctcaagtgagatagcagagcaagatgccaaaagaccataaatagagtaaggtttctatagatgtgagacagatttgagagagcatttactctgtctccctgtggatgaaactgctgctgaaatggttccaatttttaggaatctgcttacccacttcattatttgacagctttccttggtgacccaaaccttgtagcctaagccatttgtctttttctcagtggagggagtgtatggacctggccccatggctttgcatgttagagacctggcagactaaagtctctagtgtttgtttgctcacatttgctgagtgacagctatgtgccagactgcataaagggtggtggcagaagtgaaaatgtttaagaatgaccaaaaacattagtaatgaaagttaatgtgttccaggcattcttctaagtggtttacatgcactgtctcatttaatctgagataaaggatacttaagcccaaactatatctaaacccaaatctcacttggctggaaacatcaatcttaaccatttattcagaaccattaaaccaatgattccaagaaaaaaaaaaaaaaa

SEQ ID NO: 130 - DNA, 2260 bp, Homo sapiens
  mRNA (1)..(2260): gi|19924160|ref|NM_134447.1| Homo sapiens chromosome 19 open reading frame 2 (C19orf2), transcript variant 2
acacgccgcgctgaggcccgcgggcccgtcatggaggcgcccaccgtggagacgccccccgacccctcgcccccttcggccccggcccctgccctggttccgttgcgcgccccggatgtggcgcggctgcgcgaggagcaggaaaaggaagaaggtagataatgactataatgcccttcgagaaagactcagcaccttgcctgataaattgtcttataatataatggtaccatttggcccttttgccttcatgccaggaaaacttgtccatactaatgaagtcactgttttactgggggacaactggtttgcaaagtgctcagcaaagcaggctgtaggtttagttgagcaccggaaagaacatgtaagaaaaacaatagatgacttaaaaaaagtgatgaaaaattttgaatccagagttgaattcacagaagatttgcagaaaatgagcgatgctgcaggtgatattgttgacatacgagaagaaattaaatgtgacttcgaatttaaagcaaaacaccgaattgctcataaaccgcattccaaaccaaaaacttcagatatttttgaagcagatattgcaaatgatgtgaaatccaaggatttgctagctgataaagaactgtgggctcgacttgaagaactagagagacaggaagaattgctgggtgaacttgatagtaagcctgatactgtgattgcaaatggagaagatacgacatcttctgaagaggaaaaggaagatcgtaacacaaatgtgaatgcgatgcatcaagtaacagactctcatactccttgtcataaggatgttgcaagttcagaaccattcagtggtcaagtgaatagtcagttgaactgttcagtgaatggttccagttcttaccacagtgatgatgatgatgatgatgatgatgacgacgacgacgacaacattgacgacgatgatggtgataacgaccatgaggctttaggggttggagataattctataccaacaatatatttttcacatactgttgagcctaagagggtccgaataaatactggaaagaataccactttaaaattcagtgaaaagaaagaagaagccaaacgtaaacgaaagaacagcactggcagtggccactctgcccaggagctgccgaccatcaggacgcctgcagacatttacagagcctttgttgatgttgtgaatggagaatatgtccctcgcaaatccatcctgaagtctcgaagtagagagaatagtgtgtgtagcgacactagtgaaagcagtgctgctgaatttgatgataggcggggagttttgaggagtatcagctgcgaagaagccacttgcagtgacaccagtgagagcattttggaagaggaaccacaagaaaatcaaaagaaacttttgcccttatcagtaacacctgaggctttttctggaactgttatagaaaaagaatttgtatcaccttccttaacaccacccccagccattgctcatcccgcactacccactattccagaacgaaaggaagttctgttggaagcatctgaagaaactggaaagagggtttcaaagtttaaagctgccagattgcaacagaaagactaggccctgtctaggaaatgggaatttacatcctaaaacctagttgttcatttgtttagagtatctatagcaaaataggttacatgtagtttgaaataaggtatcctgagttactttggcaacaagttcttttacccttacccgtggtatttgaaaaaaatcaaggtaactgtctgaatactttaatatcagcttgttttgtgaattctctgaatactgtcaacactcttatctaagtttgcctttatgatgcagtggcagcattttgaattacttttcaaagaatactgttcatatgcattgtttttgtgtttcaaactaaatacaggcagttttgtgccagctgtgatattgtgcataccatatggaccattttaaagaaaattttaaaatttcaaatagattcaacaattacattacttgctttcacattttaaaggcactttaaaaaaatctacttctcttgtaggttttgcggctagttggctattcaagaaacctcgcccctctgaatgtcatactgtaatctttaaggaagaaagctacatgaattaattgtactctatgggaaaatttctttggaaagatattttgtaaaacttttttttccaagtaaaaactttatgaaacttggtctcaaaaaaaaaaaaaaaaaaaaaa

SEQ ID NO: 131 - DNA, 2143 bp, Homo sapiens
  mRNA (1)..(2143): gi|42542384|ref|NM_006928.3| Homo sapiens silver homolog (mouse) (SILV)
agtgcctttggttgctggagggaagaacacaatggatctggtgctaaaaagatgccttcttcatttggctgtgataggtgctttgctggctgtgggggctacaaaagtacccagaaaccaggactggcttggtgtctcaaggcaactcagaaccaaagcctggaacaggcagctgtatccagagtggacagaagcccagagacttgactgctggagaggtggtcaagtgtccctcaaggtcagtaatgatgggcctacactgattggtgcaaatgcctccttctctattgccttgaacttccctggaagccaaaaggtattgccagatgggcaggttatctgggtcaacaataccatcatcaatgggagccaggtgtggggaggacagccagtgtatccccaggaaactgacgatgcctgcatcttccctgatggtggaccttgcccatctggctcttggtctcagaagagaagctttgtttatgtctggaagacctggggccaatactggcaagttctagggggcccagtgtctgggctgagcattgggacaggcagggcaatgctgggcacacacaccatggaagtgactgtctaccatcgccggggatcccggagctatgtgcctcttgctcattccagctcagccttcaccattactgaccaggtgcctttctccgtgagcgtgtcccagttgcgggccttggatggagggaacaagcacttcctgagaaatcagcctctgacctttgccctccagctccatgaccccagtggctatctggctgaagctgacctctcctacacctgggactttggagacagtagtggaaccctgatctctcgggcacttgtggtcactcatacttacctggagcctggcccagtcactgcccaggtggtcctgcaggctgccattcctctcacctcctgtggctcctccccagttccaggcaccacagatgggcacaggccaactgcagaggcccctaacaccacagctggccaagtgcctactacagaagttgtgggtactacacctggtcaggcgccaactgcagagccctctggaaccacatctgtgcaggtgccaaccactgaagtcataagcactgcacctgtgcagatgccaactgcagagagcacaggtatgacacctgagaaggtgccagtttcagaggtcatgggtaccacactggcagagatgtcaactccagaggctacaggtatgacacctgcagaggtatcaattgtggtgctttctggaaccacagctgcacaggtaacaactacagagtgggtggagaccacagctagagagctacctatccctgagcctgaaggtccagatgccagctcaatcatgtctacggaaagtattacaggttccctgggccccctgctggatggtacagccaccttaaggctggtgaagagacaagtccccctggattgtgttctgtatcgatatggttccttttccgtcaccctggacattgtccagggtattgaaagtgccgagatcctgcaggctgtgccgtccggtgagggggatgcatttgagctgactgtgtcctgccaaggcgggctgcccaaggaagcctgcatggagatctcatcgccagggtgccagccccctgcccagcggctgtgccagcctgtgctacccagcccagcctgccagctggttctgcaccagatactgaagggtggctcggggacatactgcctcaatgtgtctctggctgataccaacagcctggcagtggtcagcacccagcttatcatgcctggtcaagaagcaggccttgggcaggttccgctgatcgtgggcatcttgctggtgttgatggctgtggtccttgcatctctgatatataggcgcagacttatgaagcaagacttctccgtaccccagttgccacatagcagcagtcactggctgcgtctaccccgcatcttctgctcttgtcccattggtgagaatagccccctcctcagtgggcagcaggtctgagtactctcatatgatgctgtgattttcctggagttgacagaaacacctatatttcccccagtcttccctgggagactactattaactgaaataaatactcagagcctgaaaaaaaaaaaaaaaaaa

SEQ ID NO: 132 - DNA, 3522 bp, Homo sapiens
  mRNA (1)..(3522): gi|77404396|ref|NM_014390.2| Homo sapiens staphylococcal nuclease domain containing 1 (SND1)
acgcttgcgcggcgagtagaacgtgtggcggcggcggagatcgcgtctctttcgctccgtgtcccgctgctgctcctgtgagcgcccggcgagtccgtcccgtccaccgtccgcagctggtagccagcctgcccctcgcctcgactccctttcaccaacaccgacacccacattgacacctccagtccggccagccgctccactcgttgcctttgcatctccacacatggcgtcctccgcgcagagcggcggctcctccgggggacccgcggtccccaccgtgcagcggggcatcatcaagatggtcctctcagggtgcgccatcattgtccgaggtcagcctcgtggtgggcctcctcctgagcggcagatcaacctcagcaacattcgtgctggaaatcttgctcgccgggcagccgccacacaacctgatgcaaaggatacccctgatgagccctgggcatttccagctcgagagttccttcgaaagaagctgattgggaaggaagtctgtttcacgatagaaaacaagactccccaggggcgagagtatggcatgatctaccttggaaaagataccaatggggaaaacattgcagaatcactggttgcagagggcttagccacccggagagaaggcatgagagctaataatcctgagcagaaccggctttcagaatgtgaagaacaagcaaaggcagccaagaaagggatgtggagtgaggggaacggttcacatactatccgggatctcaagtataccattgaaaacccaaggcactttgtggactcacaccaccagaagcctgttaatgctatcatcgagcatgtgcgggacggcagtgtggtcagggccctgctcctcccagattactacctggttacagtcatgctgtcaggcatcaagtgcccaacttttcgacgggaagcagatggcagtgaaactccagagccttttgctgcagaagccaaatttttcactgagtcgcgactgcttcagagagatgttcagatcattctggagagctgccacaaccagaacattctgggtaccatccttcatccaaatggcaacatcacagagctcctcctgaaggaaggtttcgcacgctgtgtggactggtcgattgcagtttacacccggggcgcagaaaagctgagggcggcagagaggtttgccaaagagcgcaggctgagaatatggagagactatgtggctcccacagctaatttggaccaaaaggacaagcagtttgttgccaaggtgatgcaggttctgaatgctgatgccattgttgtgaagctgaactcaggcgattacaagacgattcacctgtccagcatccgaccaccgaggctggagggggagaacacccaggataagaacaagaaactgcgtcccctgtatgacattccttacatgtttgaggcccgggaatttcttcgaaaaaagcttattgggaagaaggtcaatgtgacggtggactacattagaccagccagcccagccacagagacagtgcctgccttttcagagcgtacctgtgccactgtcaccattggaggaataaacattgctgaggctcttgtcagcaaaggtctagccacagtgatcagataccggcaggatgatgaccagagatcatcacactacgatgaactgcttgctgcagaggccagagctattaagaatggcaaaggattgcatagcaagaaggaagtgcctatccaccgtgttgcagatatatctggggatacccaaaaagcaaagcagttcctgccttttcttcagcgggcaggtcgttctgaagctgtggtggaatacgtcttcagtggttctcgtctcaaactctatttgccaaaggaaacttgccttatcaccttcttgcttgcaggcattgaatgccccagaggagcccgaaacctcccaggcttggtgcaggaaggagagcccttcagcgaggaagctacacttttcaccaaggaactggtgctgcagcgagaggtggaggtggaggtggagagcatggacaaggccggcaactttatcggctggctgcacatcgacggtgccaacctgtccgtcctgctggtggagcacgcgctctccaaggtccacttcaccgccgaacgcagctcctactacaagtccctgctgtctgccgaggaggccgcaaagcagaagaaagagaaggtctgggcccactatgaggagcagcccgtggaggaggtgatgccagtgctggaggagaaggagcgatctgctagctacaagcccgtgtttgtgactgagatcactgatgacctgcacttctacgtgcaggatgtggagaccggcacccagttggagaagctgatggagaacatgcgcaatgacattgccagtcacccccctgtagagggctcctatgccccccgcaggggagagttctgcattgccaaatttgtagatggagaatggtaccgtgcccgagtagagaaagtcgagtctcctgccaaaatacatgtcttctacattgactacggcaacagagaggtcctgccatccacccgcctgggtaccctatcacctgccttcagcactcgggtgctgccagctcaagccacggagtatgccttcgccttcatccaggtgccccaagatgatgatgcccgcacggacgccgtggacagcgtagttcgggatatccagaacactcagtgcctgctcaacgtggaacacctgagtgccggctgcccccatgtcaccctgcagtttgcagattccaagggcgatgtggggctgggcttggtgaaggaagggctggtcatggtggaggtgcgcaaggagaaacagttccagaaagtgatcacagaatacctgaatgcccaagagtcagccaagagcgccaggctgaacctgtggcgctatggagactttcgagctgatgatgcagacgaatttggctacagccgctaaggaggggatcgggtttggcccccagccccgctcacgccagtccctcttcctctgccgggagggtgttttcaactccaaaccccagagaggggttgtagattgggtccagctttgcttcagtgtgtggaaatgtctcgtggggtggcatcggggctgcggggtggggaccccaaggctttctggggcagacccttgtcctctgggatgatgggcactgctatccacagtctctgccagttggttttatttggaggtttgtgggctttttttaaaaaaaaaaagtcctcaaatcaggaagaaacatcaaagactatgtcctagtggagggagtaatcctaacacccaggctggccgccagctggcacctgcctctatcccagactgccctcgtcccagctctctgtccaactgttgattatgtgatttttctgatacgtccattctcaaatgccagtgtgttcacatcttcgctctggccagcccattctgtatttaaagcttttgaggcccaataaaatagtacgtgctgtctgcagcccttattgatcaaaaaaaaaaaaaaa

SEQ ID NO: 133 - DNA, 4248 bp, Homo sapiens
  mRNA (1)..(4248): gi|24496788|ref|NM_020117.8| Homo sapiens leucyl-tRNA synthetase (LARS)
aaaggtaaccactcctttgtggaggtcgccagggtcattgtcgtggatttgcacagtcggctgggcggtgcaatggcggaaagaaaaggaacagccaaagtggactttttgaagaagattgagaaagaaatccaacagaaatgggatactgagagagtgtttgaggtcaatgcatctaatttagagaaacagaccagcaagggcaagtattttgtaaccttcccatatccatatatgaatggacgccttcatttgggacacacgttttctttatccaaatgtgagtttgctgtagggtaccagcgattgaaaggaaaatgttgtctgtttccctttggcctgcactgtactggaatgcctattaaggcatgtgctgataagttgaaaagagaaatagagctgtatggttgcccccctgattttccagatgaagaagaggaagaggaagaaaccagtgttaaaacagaagatataataattaaggataaagctaaaggaaaaaagagtaaagctgctgctaaagctggatcttctaaataccagtggggcattatgaaatcccttggcctgtctgatgaagagatagtaaaattttctgaagcagaacattggcttgattatttcccgccactggctattcaggatttaaaaagaatgggtttgaaggtagactggcgtcgttccttcatcaccactgatgttaatccttactatgattcatttgtcagatggcaatttttaacattaagagaaagaaacaaaattaaatttgggaagcggtatacaatttactctccgaaagatggacagccttgcatggatcatgatagacaaactggagagggtgttggacctcaggaatatactttactcaaattgaaggcgcttgagccatacccatctaaattaagtggcctgaaaggtaaaaatattttcttggtggctgctactctcagacctgagaccatgtttgggcagacaaattgttgggttcgtcctgatatgaagtacattggatttgagacggtgaatggtgatatattcatctgtacccaaaaagcagccaggaatatgtcataccagggctttaccaaagacaatggcgtggtgcctgttgttaaggaattaatgggggaggaaattcttggtgcatcactttctgcacctttaacatcatacaaggtgatctatgttctcccaatgctaactattaaggaggataaaggcactggtgtggttacaagtgttccttccgactcccctgatgatattgctgccctcagagacttgaagaaaaagcaagccttacgagcaaaatatggaattagagatgacatggtcttgccatttgagccggtgccagtcattgaaatcccaggttttggaaatctttctgctgtaaccatttgtgatgagttgaaaattcagagccagaatgaccgggaaaaacttgcagaagcaaaggagaagatatatctaaaaggattttatgagggtatcatgttggtggatggatttaaaggacagaaggttcaagatgtaaagaagactattcagaaaaagatgattgacgctggagatgcacttatttacatggaaccagagaaacaagtgatgtccaggtcgtcagatgaatgtgttgtggctctgtgtgaccagtggtacttggattatggagaagagaattggaagaaacagacatctcagtgcttgaagaacctggaaacattctgtgaggagaccaggaggaattttgaagccaccttaggttggctacaagaacatgcttgctcaagaacttatggtctaggcactcacctgccttgggatgagcagtggctgattgaatcactttctgactccactatttacatggcattttacacagttgcacacctattgcaggggggtaacttgcatggacaggcagagtctccgctgggcattagaccgcaacagatgaccaaggaagtttgggattatgttttcttcaaggaggctccatttcctaagactcagattgcaaaggaaaaattagatcagttaaagcaggagtttgaattctggtatcctgttgatcttcgcgtctctggcaaggatcttgttccaaatcatctttcatattacctttataatcatgtggctatgtggccggaacaaagtgataaatggcctacagctgtgagagcaaatggacatctcctcctgaactctgagaagatgtcaaaatccacaggcaacttcctcactttgacccaagctattgacaaattttcagcagatggaatgcgtttggctctggctgatgctggtgacactgtagaagatgccaactttgtggaagccatggcagatgcaggtattctccgtctgtacacctgggtagagtgggtgaaagaaatggttgccaactgggacagcctaagaagtggtcctgccagcactttcaatgatagagtttttgccagtgaattgaatgcaggaattataaaaacagatcaaaactatgaaaagatgatgtttaaagaagctttgaaaacagggttttttgagtttcaggccgcaaaagataagtaccgtgaattggctgtggaagggatgcacagagaacttgtgttccggtttattgaagttcagacacttctcctcgctccattctgtccacatttgtgtgagcacatctggacactcctgggaaagcctgactcaattatgaatgcttcatggcctgtggcaggtcctgtggatgaagttttaatacactcctcacagtatcttatggaagtaacacatgaccttagactacgactcaagaactatatgatgccagctaaagggaagaagaccgacaaacaacccctgcagaagccctcacattgcaccatctatgtggcaaagaactatccaccttggcaacataccaccctgtctgttctacgtaaacactttgaggccaataacggaaaactgcctgacaacaaagtcattgctagtgaactaggcagtatgccagaactgaagaaatacatgaagaaagtcatgccatttgttgccatgattaaggaaaatctggagaagatggggcctcgtattctggatttgcaattagaatttgatgaaaaggctgtgcttatggagaatatagtctatctgactaattcgcttgagctagaacacatagaagtcaagtttgcctccgaagcagaagataaaatcagggaagactgctgtcctgggaaaccacttaatgtttttagaatagaacctggtgtgtccgtttctctggtgaatccccagccatccaatggccacttctcaaccaaaattgaaatcaagcaaggagataactgtgattccataatcaggcgtttaatgaaaatgaatcgaggaattaaagacctttccaaagtgaaactgatgagatttgatgatccactgttggggcctcgacgagttcctgtcctgggaaaggagtacaccgagaagacccccatttctgagcatgctgttttcaatgtggacctcatgagcaagaaaattcatctgactgagaatgggataagggtggatattggcgatacaataatctatctggttcattaaactcatgcacattggagatttatcctggtttcttaggaatactactactctgattgtgtctactgattggctatcagaaccttaggctggacctaaatagattgatttcatttctaaccatccaattctgcatgtattcataattctatcaagtcatctttgattcctggacctaataaattttttttccctttctttgggtgtccaagagaaatggtttttgccaaactctttttaaaaaacaaattgttgctatttcctagaagtttctggtttttaagatgaacataaaagtgtcagtatgcttccttttatgaggtgtactttatactttgatgaaggctaaggtgtacctaacagctttttatagtatattcatttatggagttagctgtattttttttaaaaaaagaaaagtagtaaattagcagctttttttttttttaaatgaagagaacttcatgatgatttaaaagaactaatgagaatattttgacttgacttcaattactaagtattttgtataaagaacaaataggtcctgcattttataagactttttaaagctttaattattcaactaagaaccaataatggcttcttcaaggctaatatcaatagtttataagcagtatatttcaccta

SEQ ID NO: 134 - DNA, 3603 bp, Homo sapiens
  mRNA (1)..(3603): gi|6138971|ref|NM_001619.2| Homo sapiens adrenergic, beta, receptor kinase 1 (ADRBK1)
ctcggcctcgggcgcggccgagcgccgcgcgagcaggagcggcggcggcggcggcggcggcgggaggaggcagcgccggcccaagatggcggacctggaggcggtgctggccgacgtgagctacctgatggccatggagaagagcaaggccacgccggccgcgcgcgccagcaagaagatactgctgcccgagcccagcatccgcagtgtcatgcagaagtacctggaggaccggggcgaggtgacctttgagaagatcttttcccagaagctggggtacctgctcttccgagacttctgcctgaaccacctggaggaggccaggcccttggtggaattctatgaggagatcaagaagtacgagaagctggagacggaggaggagcgtgtggcccgcagccgggagatcttcgactcatacatcatgaaggagctgctggcctgctcgcatcccttctcgaagagtgccactgagcatgtccaaggccacctggggaagaagcaggtgcctccggatctcttccagccatacatcgaagagatttgtcaaaacctccgaggggacgtgttccagaaattcattgagagcgataagttcacacggttttgccagtggaagaatgtggagctcaacatccacctgaccatgaatgacttcagcgtgcatcgcatcattgggcgcgggggctttggcgaggtctatgggtgccggaagcgtgacacaggcaagatgtacgccatgaagtgcctggacaaaaagcgcatcaagatgaagcagggggagaccctggccctgaacgagcgcatcatgctctcgctcgtcagcactggggactgcccattcattgtctgcatgtcatacgcgttccacacgccagacaagctcagcttcatcctggacctcatgaacggtggggacctgcactaccacctctcccagcacggggtcttctcagaggctgacatgcgcttctatgcggccgagatcatcctgggcctggagcacatgcacaaccgcttcgtggtctaccgggacctgaagccagccaacatccttctggacgagcatggccacgtgcggatctcggacctgggcctggcctgtgacttctccaagaagaagccccatgccagcgtgggcacccacgggtacatggctccggaggtcctgcagaagggcgtggcctacgacagcagtgccgactggttctctctggggtgcatgctcttcaagttgctgcgggggcacagccccttccggcagcacaagaccaaagacaagcatgagatcgaccgcatgacgctgacgatggccgtggagctgcccgactccttctcccctgaactacactccctgctggaggggttgctgcagagggatgtcaaccggagattgggctgcctgggccgaggggctcaggaggtgaaagagagcccctttttccgctccctggactggcagatggtcttcttgcagaggtaccctcccccgctgatccccccacgaggggaggtgaacgcggccgacgccttcgacattggctccttcgatgaggaggacacaaaaggaatcaagttactggacagtgatcaggagctctaccgcaacttccccctcaccatctcggagcggtggcagcaggaggtggcagagactgtcttcgacaccatcaacgctgagacagaccggctggaggctcgcaagaaagccaagaacaagcagctgggccatgaggaagactacgccctgggcaaggactgcatcatgcatggctacatgtccaagatgggcaacccctttctgacccagtggcagcggcggtacttctacctgttccccaaccgcctcgagtggcggggcgagggcgaggccccgcagagcctgctgaccatggaggagatccagtcggtggaggagacgcagatcaaggagcgcaagtgcctgctcctcaagatccgcggtgggaaacagttcattttgcagtgcgatagcgaccctgagctggtgcagtggaagaaggagctgcgcgacgcctaccgcgaggcccagcagctggtgcagcgggtgcccaagatgaagaacaagccgcgctcgcccgtggtggagctgagcaaggtgccgctggtccagcgcggcagtgccaacggcctctgacccgcccacccgccttttataaacctctaatttattttgtcgaatttttattatttgttttcccgccaagcgaaaaggttttattttgtaattattgtgatttcccgtggccccagcctggcccagctcccccgggaggccccgcttgcctcggctcctgctgcaccaacccagccgctgcccggcgccctctgtcctgacttcaggggctgcccgctcccagtgtcttcctgtgggggaagagcacagccctcccgccccttccccgagggatgatgccacaccaagctgtgccaccctgggctctgtgggctgcacttgtgccatgggactgtgggtggcccatcccccctcaccaggggcaggcacagcacagggatccgacttgaattttcccactgcaccccctcctgctgcagaggggcaggccctgcactgtcctgctccacagtgttggcgagaggaggggcccgttgtctccctggccctcaaggctcccacagtgactcgggctcctgtgcccttattcaggaaaagcctctgtgtcactggctgcctccactcccacttccctgacactgcggggcttggctgagagagtggcattggcagcaggtgctgctaccctccctgctgtcccctcttgccccaacccccagcacccgggctcagggaccacagcaaggcacctgcaggttgggccatactggcctcgcctggcctgaggtctcgctgatgctgggctgggtgcgaccccatctgcccaggacggggccggccaggtgggcgggcagcacagcaaggaggctggctggggcctatcagtgtgccccccatcctggcccatcagtgtacccccgcccagactggccagccccacagcccacgtcctgtcagtgccgccgcctcgcccaccgcatgccccctgtgccagtgctctgcctgtgtgtgtgcactcgtgtcgcgccttctcccccccggggctgggttggcgcaccctcccctcccgtctactcattccccggggcgtttctttgccgatttttgaatgtgattttaaagagtgaaaaatgagactatgcgtttttataaaaaatggtgcctgattcggctgtctcagactctttttgtacctggtgaccccttttcagcttctgctgggctggggcctgatggggagggtctcggtggtaccaggtctcctccaccgccatggcttccaaggtggtctgctcgggcccaggccatcttccaggtggggtgaggcagtgggtcccacttcccctcctacccctcccagctgacagtcctctccacctagtggctgtccagtgcccattcctcaccttttcccggggaggagagagcagcttctgccacttcccaggtaagcaggaggaggtgccaacagtgttaggcctggcacagtgtctgggtgatcgggacct

SEQ ID NO: 135 - DNA, 2167 bp, Homo sapiens
  mRNA (1)..(2167): gi|16933531|ref|NM_022820.3| Homo sapiens cytochrome P450, family 3, subfamily A, polypeptide 43 (CYP3A43), transcript variant 1
acctctgggcagagaaacaaagctctatatgcacagcccagcaaagagcagcacacagctgaaagaaaaactcagaagacagagctgaaaaagaaaactggtgatggatctcattccaaactttgccatggaaacatgggttcttgtggctaccagcctggtactcctctatatttatgggacccattcacataaactttttaagaagctgggaattcctgggccaacccctctgccttttctgggaactattttgttctaccttaggggtctttggaattttgacagagaatgtaatgaaaaatacggagaaatgtgggggctgtatgaggggcaacagcccatgctggtcatcatggatcccgacatgatcaaaacagtgttagtgaaagaatgttactctgtcttcacaaaccagatgcctttaggtccaatgggatttctgaaaagtgccttaagttttgctgaagatgaagaatggaagagaatacgaacattgctatctccagctttcaccagtgtaaaattcaaggaaatggtccccatcatttcccaatgtggagatatgttggtgagaagcctgaggcaggaagcagagaacagcaagtccatcaacttgaaagatttctttggggcctacaccatggatgtaatcactggcacattatttggagtgaacttggattctctcaacaatccacaagatccctttctgaaaaatatgaagaagcttttaaaattggattttttggatccctttttactcttaatatcactctttccatttcttaccccagtttttgaagccctaaatatcggtttgtttccaaaagatgttacccattttttaaaaaattccattgaaaggatgaaagaaagtcgcctcaaagataaacaaaagcatcgagtagatttctttcaacagatgatcgactcccagaattccaaagaaacaaagtcccataaagctctgtctgatctggagcttgtggcccagtcaattatcatcatttttgctgcctatgacacaactagcaccactctccccttcattatgtatgaactggccactcaccctgatgtccagcagaaactgcaggaggagattgacgcagttttacccaataaggcacctgtcacctacgatgccctggtacagatggagtaccttgacatggtggtgaatgaaacgctcagattattcccagttgttagtagagttacgagagtctgcaagaaagatattgaaatcaatggagtgttcattcccaaagggttagcagtgatggttccaatctatgctcttcaccatgacccaaagtactggacagagcctgagaagttctgccctgaaagtaggttcagtaagaagaacaaggacagcatagatctttacagatacataccttttggagctggaccccgaaactgcattggcatgaggtttgctctcacaaacataaaacttgctgtcattagagcactgcagaacttctccttcaaaccttgtaaagagactcagatcccactgaaattagacaatctaccaattcttcaaccagaaaaacctattgttctaaaagtgcacttaagagatgggattacaagtggaccctgactttccctaaggacttccactttgttcaagaaagctgtatcccagaacactagacacttcaaattgttttgtgaataaaactcagaaatgaagatgagcttaattaacctagtatactgggtgaataattagaaattctctacattcattgagctctcattgtctgggtagagtattacacgttgcatactacaaagcaggtgacaaatcaatgccaaataagtacagtcatcttctctagttctcataagactatctccccgccacctatagttagtaccctcaagtcctcctgagctgtgatcagagaataaacatttctcaacaattttaccaacaatttttaatgaaaaggaaaattatacttgtgattctcgtagtgacatttatattacatgttccatttgtgatattctataataagtattatattgagaaagtcaacaagcacctctttacaaaactgttatctgatgtcttcctgcatattaaggatgaatctacagaattagatcaataaggatcaacaaataaatatttttggtcatt

SEQ ID NO: 136 - DNA, 2156 bp, Homo sapiens
  mRNA (1)..(2156): gi|5031766|ref|NM_005526.1| Homo sapiens heat shock transcription factor 1 (HSF1)
cgggcccgttgcaagatggcggcggccatgctgggccccggggctgtgtgtgcgcagcgggcggcggcgcggcccggaaggctggcgcggcgacggcgttagcccggccctcggcccctctttgcggccgctccctccgcctattccctccttgctcgagatggatctgcccgtgggccccggcgcggcggggcccagcaacgtcccggccttcctgaccaagctgtggaccctcgtgagcgacccggacaccgacgcgctcatctgctggagcccgagcgggaacagcttccacgtgttcgaccagggccagtttgccaaggaggtgctgcccaagtacttcaagcacaacaacatggccagcttcgtgcggcagctcaacatgtatggcttccggaaagtggtccacatcgagcagggcggcctggtcaagccagagagagacgacacggagttccagcacccatgcttcctgcgtggccaggagcagctccttgagaacatcaagaggaaagtgaccagtgtgtccaccctgaagagtgaagacataaagatccgccaggacagcgtcaccaagctgctgacggacgtgcagctgatgaaggggaagcaggagtgcatggactccaagctcctggccatgaagcatgagaatgaggctctgtggcgggaggtggccagccttcggcagaagcatgcccagcaacagaaagtcgtcaacaagctcattcagttcctgatctcactggtgcagtcaaaccggatcctgggggtgaagagaaagatccccctgatgctgaacgacagtggctcagcacattccatgcccaagtatagccggcagttctccctggagcacgtccacggctcgggcccctactcggccccctccccagcctacagcagctccagcctctacgcccctgatgctgtggccagctctggacccatcatctccgacatcaccgagctggctcctgccagccccatggcctcccccggcgggagcatagacgagaggcccctatccagcagccccctggtgcgtgtcaaggaggagccccccagcccgcctcagagcccccgggtagaggaggcgagtcccgggcgcccatcttccgtggacaccctcttgtccccgaccgccctcattgactccatcctgcgggagagtgaacctgcccccgcctccgtcacagccctcacggacgccaggggccacacggacaccgagggccggcctccctcccccccgcccacctccacccctgaaaagtgcctcagcgtagcctgcctggacaagaatgagctcagtgaccacttggatgctatggactccaacctggataacctgcagaccatgctgagcagccacggcttcagcgtggacaccagtgccctgctggacctgttcagcccctcggtgaccgtgcccgacatgagcctgcctgaccttgacagcagcctggccagtatccaagagctcctgtctccccaggagccccccaggcctcccgaggcagagaacagcagcccggattcagggaagcagctggtgcactacacagcgcagccgctgttcctgctggaccccggctccgtggacaccgggagcaacgacctgccggtgctgtttgagctgggagagggctcctacttctccgaaggggacggcttcgccgaggaccccaccatctccctgctgacaggctcggagcctcccaaagccaaggaccccactgtctcctagaggccccggaggagctgggccagccgcccacccccacccccagtgcagggctggtcttggggaggcagggcagcctcgcggtcttgggcactggtgggtcggccgccatagccccagtaggacaaacgggctcgggtctgggcagcacctctggtcaggagggtcaccctggcctgccagtctgccttcccccaaccccgtgtcctgtggtttggttggggcttcacagccacacctggactgaccctgcaggttgttcatagtcagaattgtattttggatttttacacaactgtcccgttccccgctccacagagatacacagatatatacacacagtggatggacggacaagacaggcagagatctataaacagacaggctctaaaaaaaaaaaaaaaaaaaa

SEQ ID NO: 137 - DNA, 3962 bp, Homo sapiens
  mRNA (1)..(3962): gi|15991832|ref|NM_033500.1| Homo sapiens hexokinase 1 (HK1), nuclear gene encoding mitochondrial protein, transcript variant 5
aaaacatctatcttgctgtgtttggacaggccagcccctgaaacatcttgggcaatggagggttaacttctcaaagtttaataggcaagaccagcaaccatgcaacaaggacttcaactaaccaactaaagaactgttccccagagcattgttcctgagaaggaaaagagtccaaacacctacccacacctgctttgtgccaagaatccacagttggattgcaaggacagtgtatgttgtccttttggaaaaatgagagtgagcccaaatgaagaacaagcaaaggcgttcaagacccagctgttgagagtagaaaagcagaagaaaggacccgaggtcagcaagtgccctccccacaatggggcagatctgccagcgagaatcggctacagcagctgaaaaaccaaaacttcatctacttgctgaaagtgagcattgttgatgctcttgagagcatcagccaggacattaatgtgcaccactgtggtggcgtggaaagatggcaaaaagagccctgcgtgattttattgacaagtatctctatgccatgcggctctccgatgaaactctcatagatatcatgactcgcttcaggaaggagatgaagaatggcctctcccgggattttaatccaacagccacagtcaagatgttgccaacattcgtaaggtccattcctgatggctctgaaaagggagatttcattgccctggatcttggtgggtcttcctttcgaattctgcgggtgcaagtgaatcatgagaaaaaccagaatgttcacatggagtccgaggtttatgacaccccagagaacatcgtgcacggcagtggaagccagctttttgatcatgttgctgagtgcctgggagatttcatggagaaaaggaagatcaaggacaagaagttacctgtgggattcacgttttcttttccttgccaacaatccaaaatagatgaggccatcctgatcacctggacaaagcgatttaaagcgagcggagtggaaggagcagatgtggtcaaactgcttaacaaagccatcaaaaagcgaggggactatgatgccaacatcgtagctgtggtgaatgacacagtgggcaccatgatgacctgtggctatgacgaccagcactgtgaagtcggcctgatcatcggcactggcaccaatgcttgctacatggaggaactgaggcacattgatctggtggaaggagacgaggggaggatgtgtatcaatacagaatggggagcctttggagacgatggatcattagaagacatccggacagagtttgacagggagatagaccggggatccctcaaccctggaaaacagctgtttgagaagatggtcagtggcatgtacttgggagagctggttcgactgatcctagtcaagatggccaaggagggcctcttatttgaagggcggatcaccccggagctgctcacccgagggaagtttaacaccagtgatgtgtcagccatcgaaaagaataaggaaggcctccacaatgccaaagaaatcctgacccgcctgggagtggagccgtccgatgatgactgtgtctcagtccagcacgtttgcaccattgtctcatttcgctcagccaacttggtggctgccacactgggcgccatcttgaaccgcctgcgtgataacaagggcacacccaggctgcggaccacggttggtgtcgacggatctctttacaagacgcacccacagtattcccggcgtttccacaagactctaaggcgcttggtgccagactccgatgtgcgcttcctcctctcggagagtggcagcggcaagggggctgccatggtgacggcggtggcctaccgcttggccgagcagcaccggcagatagaggagaccctggctcatttccacctcaccaaagacatgctgctggaggtgaagaagaggatgcgggccgagatggagctggggctgaggaagcagacgcacaacaatgccgtggttaagatgctgccctccttcgtccggagaactcccgacgggaccgagaatggtgacttcttggccctggatcttggaggaaccaatttccgtgtgctgctggtgaaaatccgtagtgggaaaaagagaacggtggaaatgcacaacaagatctacgccattcctattgaaatcatgcagggcactggggaagagctgtttgatcacattgtctcctgcatctctgacttcttggactacatggggatcaaaggccccaggatgcctctgggcttcacgttctcatttccctgccagcagacgagtctggacgcgggaatcttgatcacgtggacaaagggttttaaggcaacagactgcgtgggccacgatgtagtcaccttactaagggatgcgataaaaaggagagaggaatttgacctggacgtggtggctgtggtcaacgacacagtgggcaccatgatgacctgtgcttatgaggagcccacctgtgaggttggactcattgttgggaccggcagcaatgcctgctacatggaggagatgaagaacgtggagatggtggagggggaccaggggcagatgtgcatcaacatggagtggggggcctttggggacaacgggtgtctggatgatatcaggacacactacgacagactggtggacgaatattccctaaatgctgggaaacaaaggtatgagaagatgatcagtggtatgtacctgggtgaaatcgtccgcaacatcttaatcgacttcaccaagaagggattcctcttccgagggcagatctctgagacgctgaagacccggggcatctttgagaccaagtttctctctcagatcgagagtgaccgattagcactgctccaggtccgggctatcctccagcagctaggtctgaatagcacctgcgatgacagtatcctcgtcaagacagtgtgcggggtggtgtccaggagggccgcacagctgtgtggcgcaggcatggctgcggttgtggataagatccgcgagaacagaggactggaccgtctgaatgtgactgtgggagtggacgggacactctacaagcttcatccacacttctccagaatcatgcaccagacggtgaaggaactgtcaccaaaatgtaacgtgtccttcctcctgtctgaggatggcagcggcaagggggccgccctcatcacggccgtgggcgtgcggttacgcacagaggcaagcagctaagagtccgggatccccagcctactgcctctccagcacttctctcttcaagcggcgaccccctaccctcccagcgagttgcgctgggagacgctggcgccagggcctgccggcgcggggaggaaagcaaaatccaactaatggtatatattgtagggtacagaatagagcgtgtgctgttgataatatctctcacccggatccctcctcacttgccctgccactttgcatggtttgattttgacctggtcccccacgtgtgaagtgtagtggcatccatttctaatgtatgcattcatccaacagagttatttattggctggagatggaaaatcacaccacctgacaggccttctgggcctccaaagcccatccttggggttccccctccctgtgtgaaatgtattatcaccagcagacactgccgggcctccctcccgggggcactgcctgaaggcgagtgtgggcatagcattagctgcttcctcccctcctggcacccactgtggcctggcatcgcatcgtggtgtgtcaatgccacaaaatcgtgtgtccgtggaaccagtcctagccgcgtgtgacagtcttgcattctgtttgtctcgtggggggaggtggacagtcctgcggaaatgtgtcttgtcttccatttggataaaaggaaccaaccaacaaacaatgccatcactggaatttcccaccgctttgtgagccgtgtcgtatgacctagtaaactttgtaccaattc

SEQ ID NO: 138 - DNA, 3778 bp, Homo sapiens
  mRNA (1)..(3778): gi|55770843|ref|NM_001903.2| Homo sapiens catenin (cadherin-associated protein), alpha 1, 102kDa (CTNNA1)
ccatttcctcctcctagccggactggagggagacaaagcagcgcccgtctgcttcgggcctctggaatttagcgctcgcccagctagccgcagaaatgactgctgtccatgcaggcaacataaacttcaagtgggatcctaaaagtctagagatcaggactctggcagttgagagactgttggagcctcttgttacacaggttacaacccttgtaaacaccaatagtaaagggccctctaataagaagagaggtcgttctaagaaggcccatgttttggctgcatctgttgaacaagcaactgagaatttcttggagaagggggataaaattgcgaaggagagccagtttctcaaggaggagcttgtggctgctgtagaagatgttcgaaaacaaggtgatttgatgaaggctgctgcaggagagttcgcagatgatccctgctcttctgtgaagcgaggcaacatggttcgggcagctcgagctttgctctctgctgttacccggttgctgattttggctgacatggcagatgtctacaaattacttgttcagctgaaagttgtggaagatggtatcttgaagttgaggaatgctggcaatgaacaagacttaggaatccagtataaagccctaaaacctgaagtggataagctgaacattatggcagccaaaagacaacaggaattgaaagatgttggccatcgtgatcagatggctgcagctagaggaatcctgcagaagaacgttccgatcctctatactgcatcccaggcatgcctacagcaccctgatgtcgcagcctataaggccaacagggacctgatatacaagcagctgcagcaggcggtcacaggcatttccaatgcagcccaggccactgcctcagacgatgcctcacagcaccagggtggaggaggaggagaactggcatatgcactcaataactttgacaaacaaatcattgtggaccccttgagcttcagcgaggagcgctttaggccttccctggaggagcgtctggaaagcatcattagtggggctgccttgatggccgactcgtcctgcacgcgtgatgaccgtcgtgagcgaattgtggcagagtgtaatgctgtccgccaggccctgcaggacctgctttcggagtacatgggcaatgctggacgtaaagaaagaagtgatgcactcaattctgcaatagataaaatgaccaagaagaccagggacttgcgtagacagctccgcaaagctgtcatggaccacgtttcagattctttcctggaaaccaatgttccacttttggtattgattgaagctgcaaagaatggaaatgagaaagaagttaaggagtatgcccaagttttccgtgaacatgccaacaaattgattgaggttgccaacttggcctgttccatctcaaataatgaagaaggtgtaaagcttgttcgaatgtctgcaagccagttagaagccctctgtcctcaggttattaatgctgcactggctttagcagcaaaaccacagagtaaactggcccaagagaacatggatctttttaaagaacaatgggaaaaacaagtccgtgttctcacagatgctgtcgatgacattacttccattgatgacttcttggctgtctcagagaatcacattttggaagatgtgaacaaatgtgtcattgctctccaagagaaggatgtggatggcctggaccgcacagctggtgcaattcgaggccgggcagcccgggtcattcacgtagtcacctcagagatggacaactatgagccaggagtctacacagagaaggttctggaagccactaagctgctctccaacacagtcatgccacgttttactgagcaagtagaagcagccgtggaagccctcagctcggaccctgcccagcccatggatgagaatgagtttatcgatgcttcccgcctggtatatgatggcatccgggacatcaggaaagcagtgctgatgataaggacccctgaggagttggatgactctgactttgagacagaagattttgatgtcagaagcaggacgagcgtccagacagaagacgatcagctgatagctggccagagtgcccgggcgatcatggctcagcttccccaggagcaaaaagcgaagattgcggaacaggtggccagcttccaggaagaaaagagcaagctggatgctgaagtgtccaaatgggacgacagtggcaatgacatcattgtgctggccaagcagatgtgcatgattatgatggagatgacagactttacccgaggtaaaggaccactcaaaaatacatcggatgtcatcagtgctgccaagaaaattgctgaggcaggatccaggatggacaagcttggccgcaccattgcagaccattgccccgactcggcttgcaagcaggacctgctggcctacctgcaacgcatcgccctctactgccaccagctgaacatctgcagcaaggtcaaggccgaggtgcagaatctcggcggggagcttgttgtctctggggtggacagcgccatgtccctgatccaggcagccaagaacttgatgaatgctgtggtgcagacagtgaaggcatcctacgtcgcctctaccaaataccaaaagtcacagggtatggcttccctcaaccttcctgctgtgtcatggaagatgaaggcaccagagaaaaagccattggtgaagagagagaaacaggatgagacacagaccaagattaaacgggcatctcagaagaagcacgtgaacccggtgcaggccctcagcgagttcaaagctatggacagcatctaagtctgcccaggccggccgcccccacccctcggggctcctgaatatcagtcactgttcgtcactcaaatgaatttgctaaatacaacactgatactagattccacagggaaatgggcagactgaaccagtccaggtggtgaattttccaagaacatagtttaagttgattaaaaatgcttttagaatgcaggagcctacttctagctgtattttttgtatgcttaaataaaaataaaaattcataaccaaagagaatcccacattagcttgttagtaatgctctgaccaagccgagatgcccattctcttagtgatggcggcgttagggtttgagagaagggaatttggctcaacttcagttgagagggtgcagtccagacagcttgactgcttttaaatgaccaaagatgacctgtggtaagcaacctgggcatcttaggaagcagtccctggagaaggcatgttcccagaaaggtctctggagggacaaactcactcagtaaaacataatgtatcatgaagaaaactgattctctatgacatgaaatgaaaattttaatgcattgttataattactaatgtacgctgctgcaggacattaataaagttgcttttttaggctacagtgtctcgatgccataatcagaacacactttttttcctctttctcccagcttcaaatgcaaattcatcattgggctcacttctaataactgcagtgtttcccgccttgggcttgcagcagaaaaacctgacaacatagtgtttgctaaggcagtaatttagactttaccttatttgtgattactgtagtgattgattgattgattactattaactacaaggtataatttactatcaccttatttaaattttatgaattaatttgaatgttttttacactaactaacttttcccaataaagtccactatgaaaccacgacaaaaaaaaaaaaaaaaaa

SEQ ID NO: 139 - DNA, 2906 bp, Homo sapiens
  mRNA (1)..(2906): gi|65508074|ref|NM_004844.2| Homo sapiens SH3-domain binding protein 5 (BTK-associated) (SH3BP5), transcript variant 1
gcgcccatttcctctgctccgccgcggccggaggtatccgcatcggcgagctgcgtctcccgggtgtcggccccggcggctccccgaccgtgcccggctgtggcgaggcggctccagcccagcctgtggcagccgcgacccccggggcgctccggagcccactgcgcggcgcgcgtgccggctgcctgcatggacgcggcactgaagcggagccgctcggaggagccagccgaaatcctgccgcctgcccgggacgaggaggaggaggaggaagaggggatggagcaggggctggaggaggaagaagaggtggatccccggatccagggagaactggagaagttaaatcagtccacggatgatatcaacagacgggagactgaacttgaggatgctcgtcagaagttccgctctgttctggttgaagcaacggtgaaactggatgaactggtgaagaaaattggcaaagctgtggaagactccaagccctactgggaggcacggagggtggcgaggcaggctcagctggaagctcagaaagccacgcaggacttccagagggccacagaggtgctccgtgccgccaaggagaccatctccctggccgagcagcggctgctggaggatgacaagcggcagttcgactccgcctggcaggagatgctgaatcacgccactcagagggtcatggaggcggagcagaccaagaccaggagcgagctggtgcataaggagacggcagccaggtacaatgccgccatgggccgcatgcgacagctggagaagaaactcaagagagccatcaacaagtccaagccttattttgaactcaaggcaaagtactatgtgcagctcgagcaactgaaaaagactgtggatgacctgcaggccaaactgaccctggcaaaaggcgagtacaagatggccctgaagaacctggagatgatctcagatgagatccacgagcggcggcgctccagtgccatggggcctcggggatgcggtgttggtgctgagggcagcagcacatctgtggaggatctgccagggagcaaacctgagcctgatgccatttctgtggcctcggaggcctttgaagatgacagctgtagcaactttgtgtctgaagatgactcggaaacccagtccgtgtccagctttagttcaggaccaacaagcccgtctgagatgcctgaccagttccctgcggttgtgaggcctggcagcctggatctgcccagccctgtgtccctgtcagagtttgggatgatgttcccagtgttgggccctcgaagtgaatgcagcggggcctcctcccctgaatgtgaagtagaacgaggagacagggcagaaggggcagagaataaaacaagtgacaaagccaacaacaaccggggcctcagcagtagcagtggcagtggtggcagcagtaagagccaaagcagcacctcccctgagggccaggccttggagaaccggatgaagcagctctccctacagtgctcaaagggaagagatggaattattgctgacataaaaatggtgcagattggctgattcatcctgggccctggccgatgtgcatatcaacatttatacatggaactggagaacattgtgccaataatcatttaatatatgccaaatcttacacgtctactctaaactgctctaatgaagtttcagtgaccttgagggctaaagattgttcttctgggtaagagctcttgggctggtttttcagagcagagttcttgttgtgggtagactgtgactaggttcacagcctttgtggaacattccgtataacggcattgtggaagcaataactagttcctatgaaagaaccagagctgggaagatggctgggaagccaggccaaagtgggggcaacagcttgcttctctttctcttctcaccctcagtttgtatgggaaaatggagatgtcctctccactttatcccacgatatctaaatgaaaaagaaagaaaacccacacacaaagcaaaaactcaagtattaagagcacatatttttgacccagtggaggcttaaaaaaaaaaaaatccaagaacacaattcattttcaccacctctggtgttcagagggggcttttaaaaaagcgtgtatgctgggatacccattaaaaccattttctagaaggctaccatgagctgcactttttggggtgggaaaggtgaatgccagtggggatgcggggggatgagggtaggagggacttatagaaggggatttgtggctgtgggggagaaggttctacagcataagccttatcctgccagccaaggggatttattctaagagaagtgcatgtgaagaatggttgccactgttattagattgacaagatgttaatttctctgtaggttgtaactttaaaaataaatgaaattatttaagggttatgctgcactagtattccttagaggaaacagttctttaaagttaggaaagggagtaggcaggcatgtgttggcaaaggctgttaatagtagttaagtgttaagactgcttttctttaacgttttcatggtaatgcatatttagagcactgtatttttgtcttgttaagaaaatttagcatttctaaaagaaaaaagcaaccctctttcaaactgttaattctgtcacagcctgtatattttagtcatttgtaaatctcttcatacaatagtgacttcttttttgactgatacagtatcttaattacaaggttattttgtacttgtcttaatacactaagtgtaataaaaacggcttgagaaaagtttctcctttctgtgacttcaaataagaactcccagtattgcctaaatcttctaggcaaccctttttccataaggaagagcatggagtgctgtggtcaccagtaatcattttcaa

SEQ ID NO: 140 - DNA, 2932 bp, Homo sapiens
  mRNA (1)..(2932): gi|23397426|ref|NM_006372.3| Homo sapiens synaptotagmin binding, cytoplasmic RNA interacting protein (SYNCRIP)
agagaggagccgactcggcagggactgggggaccgggccgagagtgcgagcgagcgagggagggagtgagggagcgtgcgagccagaaggggaaaggcggccactcgtgcctgagcgaccgcagaggggagtgggagcagtggggtaaaggagcggggggcgggaataagaaaggccgagagaaggcggacagaggctagtggtggtggtggtggtagggggagaaggaggagctggaggagggcaggggctgagggagtgagtgaagcggacgcgcgagggaggggagggaagggaagggaagggaagggggggtcacgcgggggcgcgcgcgcgcaccgggagcgcgctcggaggcgagtggaactggatcgggtttgctgccagcggcgtgagcttcggccgccattttacaacagctccactcgcgccggacacagggagcagcgagcacgcgtttcccgcaacccgataccatcggacaggatttctccgcctcagcccaacggggagatctctggaaacatggctacagaacatgttaatggaaatggtactgaagagcccatggatactacttctgcagttatccattcagaaaattttcagacattgcttgatgctggtttaccacagaaagttgctgaaaaactagatgaaatttacgttgcagggctagttgcacatagtgatttagatgaaagagctattgaagctttaaaagaattcaatgaagacggtgcattggcagttcttcaacagtttaaagacagtgatctctctcatgttcagaacaaaagtgcctttttatgtggagtcatgaagacttacaggcagagagaaaaacaagggaccaaagtagcagattctagtaaaggaccagatgaggcaaaaattaaggcactcttggaaagaacaggctacacacttgatgtgaccactggacagaggaagtatggaggaccacctccagattccgtttattcaggtcagcagccttctgttggcactgagatatttgtgggaaagatcccaagagatctatttgaggatgaacttgttccattatttgagaaagctggacctatatgggatcttcgtctaatgatggatccactcactggtctcaatagaggttatgcgtttgtcactttttgtacaaaagaagcagctcaggaggctgttaaactgtataataatcatgaaattcgttctggaaaacatattggtgtctgcatctcagttgccaacaataggctttttgtgggctctattcctaagagtaaaaccaaggaacagattcttgaagaatttagcaaagtaacagagggtcttacagacgtcattttataccaccaaccggatgacaagaaaaaaaacaggagcttttgctttcttgaatatgaagatcacaaaacagctgcccaggcaaggcgtaggttaatgagtggtaaagtcaaggtctgggggaatgttggaactgttgaatgggctgatcctatagaagatcctgatcctgaggttatggcaaaggtaaaagtgctgtttgtacgcaaccttgccaatactgtaacagaagagattttagaaaaggcatttagtcagtttgggaaactggaacgagtgaagaagttaaaagattatgcgttcattcattttgatgagcgagatggtgctgtcaaggctatggaagaaatgaatggcaaagacttggagggagaaaatattgaaattgtttttgccaagccaccagatcagaaaaggaaagaaagaaaagctcagaggcaagcagcaaaaaatcaaatgtatgacgattactactattatggtccacctcatatgccccctccaacaagaggtcgagggcgtggaggtagaggtggttatggatatcctccagattattatggatatgaagattattatgattattatggttatgattaccataactatcgtggtggatatgaagatccatactatggttatgaagattttcaagttggagctagaggaaggggtggtagaggagcaaggggtgctgctccatccagaggtcgtggggctgctcctccccgcggtagagccggttattcacagagaggaggtcctggatcagcaagaggcgttcgaggtgcgagaggaggtgcccaacaacaaagaggccgcggggtacgtggtgcgaggggtggccgcggtggaaatgtaggaggaaagcgcaaagctgatgggtacaaccagccagattccaagcggcgccagaccaataatcagaactggggctcccaacccattgctcagcaaccgctccaaggtggtgatcattctggtaactatggttacaaatctgaaaaccaggagttttatcaggatacttttgggcaacagtggaagtagaaacagtagggcctctgtaaaattggagactgataggttgatcagaaactcaccctaaatctgaacgggtgccgctataatttgtgacatctggcaagatttccctttatgtatatattttaacaatccgcttggacacgaacaaagccacacttctaactgcttctggcgaactgattttatttttaatttttttcaataaagatattcttagatactgaaagaaatagttaatgagtttgcatttgtgcttgagaaaatttggctcaagtccatttggctgtagtgtcaacgatgtttccagtagtgtttagatttggtgtcttcaaaggtagttgattaaaaccaagtgtgtctttaatatcttgtatcagaataactttgtatgttaccaacttaaattgctagaataaggtaaattgatacacaactgctatttttaatttagaactttgacctaatttgggttttcaaaaccattttggctacttgtattctttatgctgttgtttatttcaataaaaaattcacacct

SEQ ID NO: 141 - DNA, 1477 bp, Homo sapiens
  mRNA (1)..(1477): gi|12232400|ref|NM_022743.1| Homo sapiens SET and MYND domain containing 3 (SMYD3)
gtggattttagagatacctcccctccttctgctcagctgccttgcagtaattaaactctttctctgctgcaacacccctactgttctccgtgtattggcttttctgggcagcaggaaggaaaagctgatgcgatgctctcagtgccgcgtcgccaaatactgtagtgctaagtgtcagaaaaaagcttggccagaccacaagcgggaatgcaaatgccttaaaagctgcaaacccagatatcctccagactccgttcgacttcttggcagagttgtcttcaaacttatggatggagcaccttcagaatcagagaagctttactcattttatgatctggagtcaaatattaacaaactgactgaagataagaaagagggcctcaggcaactcgtaatgacatttcaacatttcatgagagaagaaatacaggatgcctctcagctgccacctgcctttgacctttttgaagcctttgcaaaagtgatctgcaactctttcaccatctgtaatgcggagatgcaggaagttggtgttggcctatatcccagtatctctttgctcaatcacagctgtgaccccaactgttcgattgtgttcaatgggccccacctcttactgcgagcagtccgagacatcgaggtgggagaggagctcaccatctgctacctggatatgctgatgaccagtgaggagcgccggaagcagctgagggaccagtactgctttgaatgtgactgtttccgttgccaaacccaggacaaggatgctgatatgctaactggtgatgagcaagtatggaaggaagttcaagaatccctgaaaaaaattgaagaactgaaggcacactggaagtgggagcaggttctggccatgtgccaggcgatcataagcagcaattctgaacggcttcccgatatcaacatctaccagctgaaggtgctcgactgcgccatggatgcctgcatcaacctcggcctgttggaggaagccttgttctatggtactcggaccatggagccatacaggatttttttcccaggaagccatcccgtcagaggggttcaagtgatgaaagttggcaaactgcagctacatcaaggcatgtttccccaagcaatgaagaatctgagactggcttttgatattatgagagtgacacatggcagagaacacagcctgattgaagatttgattctacttttagaagaatgcgacgccaacatcagagcatcctaagggaacgcagtcagagggaaatacggcgtgtgtctttgttgaatgccttattgaggtcacacactctatgctttgttagctgtgtgaacctctcttattggaaattctgttccgtgtttgtgtaggtaaataaaggcagacatggtttgcaaaccacaagaatcattagttgtagagaagcacgattataataaattcaaaacatttggttgaggatgccaaaaaaaaaaaaaaaaaaaa

SEQ ID NO: 142 - DNA, 2567 bp, Homo sapiens
  mRNA (1)..(2567): gi|20149593|ref|NM_007355.2| Homo sapiens heat shock 90kDa protein 1, beta (HSPCB)
ctccggcgcagtgttgggactgtctgggtatcggaaagcaagcctacgttgctcactattacgtataatccttttcttttcaagatgcctgaggaagtgcaccatggagaggaggaggtggagacttttgcctttcaggcagaaattgcccaactcatgtccctcatcatcaataccttctattccaacaaggagattttccttcgggagttgatctctaatgcttctgatgccttggacaagattcgctatgagagcctgacagacccttcgaagttggacagtggtaaagagctgaaaattgacatcatccccaaccctcaggaacgtaccctgactttggtagacacaggcattggcatgaccaaagctgatctcataaataatttgggaaccattgccaagtctggtactaaagcattcatggaggctcttcaggctggtgcagacatctccatgattgggcagtttggtgttggcttttattctgcctacttggtggcagagaaagtggttgtgatcacaaagcacaacgatgatgaacagtatgcttgggagtcttctgctggaggttccttcactgtgcgtgctgaccatggtgagcccattggcaggggtaccaaagtgatcctccatcttaaagaagatcagacagagtacctagaagagaggcgggtcaaagaagtagtgaagaagcattctcagttcataggctatcccatcaccctttatttggagaaggaacgagagaaggaaattagtgatgatgaggcagaggaagagaaaggtgagaaagaagaggaagataaagatgatgaagaaaaacccaagatcgaagatgtgggttcagatgaggaggatgacagcggtaaggataagaagaagaaaactaagaagatcaaagagaaatacattgatcaggaagaactaaacaagaccaagcctatttggaccagaaaccctgatgacatcacccaagaggagtatggagaattctacaagagcctcactaatgactgggaagaccacttggcagtcaagcacttttctgtagaaggtcagttggaattcagggcattgctatttattcctcgtcgggctccctttgacctttttgagaacaagaagaaaaagaacaacatcaaactctatgtccgccgtgtgttcatcatggacagctgtgatgagttgataccagagtatctcaattttatccgtggtgtggttgactctgaggatctgcccctgaacatctcccgagaaatgctccagcagagcaaaatcttgaaagtcattcgcaaaaacattgttaagaagtgccttgagctcttctctgagctggcagaagacaaggagaattacaagaaattctatgaggcattctctaaaaatctcaagcttggaatccacgaagactccactaaccgccgccgcctgtctgagctgctgcgctatcatacctcccagtctggagatgagatgacatctctgtcagagtatgtttctcgcatgaaggagacacagaagtccatctattacatcactggtgagagcaaagagcaggtggccaactcagcttttgtggagcgagtgcggaaacggggcttcgaggtggtatatatgaccgagcccattgacgagtactgtgtgcagcagctcaaggaatttgatgggaagagcctggtctcagttaccaaggagggtctggagctgcctgaggatgaggaggagaagaagaagatggaagagagcaaggcaaagtttgagaacctctgcaagctcatgaaagaaatcttagataagaaggttgagaaggtgacaatctccaatagacttgtgtcttcaccttgctgcattgtgaccagcacctacggctggacagccaatatggagcggatcatgaaagcccaggcacttcgggacaactccaccatgggctatatgatggccaaaaagcacctggagatcaaccctgaccaccccattgtggagacgctgcggcagaaggctgaggccgacaagaatgataaggcagttaaggacctggtggtgctgctgtttgaaaccgccctgctatcttctggcttttcccttgaggatccccagacccactccaaccgcatctatcgcatgatcaagctaggtctaggtattgatgaagatgaagtggcagcagaggaacccaatgctgcagttcctgatgagatcccccctctcgagggcgatgaggatgcgtctcgcatggaagaagtcgattaggttaggagttcatagttggaaaacttgtgcccttgtatagtgtccccatgggctcccactgcagcctcgagtgcccctgtcccacctggctccccctgctggtgtctagtgtttttttccctctcctgtccttgtgttgaaggcagtaaactaagggtgtcaagccccattccctctctactcttgacagcaggattggatgttgtgtattgtggtttattttattttcttcattttgttctgaaattaaagtatgcaaaataaagaatatgccgttttaaaaaaaaaaaaaaaaaaaaaaaaaaaaa

SEQ ID NO: 143 - DNA, 4357 bp, Homo sapiens
  mRNA (1)..(4357): gi|54112120|ref|NM_012426.3| Homo sapiens splicing factor 3b, subunit 3, 130kDa (SF3B3)
gccgcgcgccaccagaatgtccctgtcttgaggtctaatggcggacgccagtatgttggagttggtggtggcttaagttttgaagggaggtagcatccgttggatatccacaccatccttctcgctgcaggctttcttggactccgtactgttggtgtaaccaaggcctggaggtctgggtggctcaggtttcctgcagccatgtttctgtacaacttaaccttgcagagagccactggcatcagctttgccattcatggaaacttttctggaaccaaacaacaagaaattgttgtttcccgtgggaagatcttggagctgcttcgcccagaccccaacactggcaaagtacataccctactcactgtggaagtattcggtgttatccggtcactcatggcctttaggctgacaggtggcaccaaagactacattgtagttggcagtgactctggtcgaattgttattttggaataccagccatctaagaatatgtttgagaagattcaccaagaaacctttggcaagagtggatgccgtcgcatcgttcctggccagttcttagctgtggatcccaaagggcgagccgttatgattagtgccattgagaaacagaaattggtgtatattttgaacagagatgctgcagcccgacttaccatttcatctcccctggaagcccacaaagcaaacactttagtgtatcatgtagttggagtagatgtcggatttgaaaatccaatgtttgcttgtctggaaatggattatgaggaagcagacaatgatccaacaggggaagcagcagctaatacccagcagacacttactttctatgagctagaccttggtttaaatcatgtggtccgaaaatacagtgaacctttggaggaacacggcaacttccttattacagttccaggagggtcagatggtccaagtggagtactgatctgctctgaaaactatattacttacaagaactttggtgaccagccagatatccgctgtccaattcccaggaggcggaatgacctggatgaccctgaaagaggaatgatttttgtctgctctgcaacccataaaaccaaatcgatgttcttctttttggctcaaactgagcagggagatatctttaagatcactttggagacagatgaagatatggttactgagatccggctcaaatattttgatactgtacccgttgctgctgccatgtgtgtgcttaaaacagggttcctttttgtagcatcagaatttggaaaccattacttatatcaaattgcacatcttggagatgatgatgaagaacctgagttttcatcagccatgcctctggaagaaggagacacattcttttttcagccaagaccacttaaaaaccttgtgctggttgatgagttggacagcctctctcccattctgttttgccagatagctgatctggccaatgaagatactccacagttgtatgtggcctgtggtaggggaccccgatcatctctgagagtcctaagacatggacttgaggtgtcagaaatggctgtttctgagctacctggtaaccccaacgctgtctggacagtgcgtcgacacattgaagatgagtttgatgcctacatcattgtgtctttcgtgaatgccaccctagtgttgtccattggagaaactgtagaagaagtgactgactctgggttcctggggaccaccccgaccttgtcctgctccttattaggagatgatgccttggtgcaggtctatccagatggcattcggcacatacgagcagacaagagagtcaatgagtggaagacccctggaaagaaaacaattgtgaagtgtgcagtgaaccagcgacaagtggtgattgccctgacaggaggagagctggtctatttcgagatggatccttcaggacagctgaatgagtacacagaacggaaggagatgtcagcagatgtggtgtgcatgagtctggccaatgtaccccctggagagcagcggtctcgcttcctggctgtggggcttgtggacaacactgtcagaatcatctccctggatccctcagactgtttgcaacctctaagcatgcaggctctcccagcccagcctgagtccttgtgtatcgtggaaatgggtgggactgagaagcaggatgagctgggtgagaggggctcgattggcttcctatacctgaatattgggctacagaacggtgtgctgctgaggactgtcttggaccctgtcactggggatttgtctgatactcgcactcggtacctggggtcccgtcctgtgaagctcttccgagtccgaatgcaaggccaggaggcagtattggccatgtcaagccgctcatggttgagctattcttaccaatctcgcttccatctcaccccactgtcttacgagacactggaatttgcatcgggttttgcctcggaacagtgtcccgagggcattgtggccatctccaccaacaccctacggattttggcattagagaagctcggtgctgtcttcaatcaagtagccttcccactgcagtacacacccaggaaatttgtcatccaccctgagagtaacaaccttattatcattgaaacggaccacaatgcctacactgaggccacgaaagctcagagaaagcagcagatggcagaggaaatggtggaagcagcaggggaggatgagcgggagctggccgcagagatggcagcagcattcctcaatgaaaacctccctgaatccatctttggagctcccaaggctggcaatgggcagtgggcctctgtgatccgagtgatgaatcccattcaagggaacacactggaccttgtccagctggaacagaatgaggcagcttttagtgtggctgtgtgcaggttttccaacactggtgaagactggtatgtgctggtgggtgtggccaaggacctgatactaaacccccgatctgtggcagggggcttcgtctatacttacaagcttgtgaacaatggggaaaaactggagtttttgcacaagactcctgtggaagaggtccctgctgctattgccccattccaggggagggtgttgattggtgtggggaagctgttgcgtgtctatgacctgggaaagaagaagttactccgaaaatgtgagaataagcatattgccaattatatctctgggatccagactatcggacatagggtaattgtatctgatgtccaagaaagtttcatctgggttcgctacaagcgtaatgaaaaccagcttatcatctttgctgatgatacctacccccgatgggtcactacagccagcctcctggactatgacactgtggctggggcagacaagtttggcaacatatgtgtggtgaggctcccacctaacaccaatgatgaagtagatgaggatcctacaggaaacaaagccctgtgggaccgtggcttgctcaatggggcctcccagaaggcagaggtgatcatgaactaccatgtcggggagacggtgctgtccttgcagaagaccacgctgatccctggaggctcagaatcacttgtctataccaccttgtctggaggaattggcatccttgtgccattcacgtcccatgaggaccatgacttcttccagcatgtggaaatgcacctgcggtctgaacatccccctctctgtgggcgggaccacctcagctttcgctcctactacttccctgtgaagaatgtgattgatggagacctctgtgagcagttcaattccatggaacccaacaaacaaaagaacgtctctgaagaactggaccgaaccccacccgaagtgtccaagaaactcgaggatatccggacccgctacgccttctgagccctcctttcccggtggggcttgccagagactgtgtgttttgtttcccccaccaccatcactgccacctggcttctgccatgtggcaggagggtgactggataattaagactgcattatgaaagtcaacagctctttcccctcagctcttctcctggaatgactggcttcccctcaaattggcactgagatttgctacacttctccccacctggtacatgatacatgaccccaggttccagtgtagaacctgagtcccccattccccaaagccatccctgcattgatatgtcttgactctcctgtctacttttgcacacacccttaatttttaattggttttcttgtaaatacagttttgtacaatgttatctctgtgggaggaaggaggcaggctgtggtgggactgggtagggtatagtatcactcctgagttccactgctctagaatctaaccagaaatagaaacctagtttttaaggtgaaaaaaaaaaaaaaaaaa

SEQ ID NO: 144 - DNA, 5921 bp, Homo sapiens
  mRNA (1)..(5921): gi|14719826|ref|NM_000088.2| Homo sapiens collagen, type I, alpha 1 (COL1A1)
agcagacgggagtttctcctcggggtcggagcaggaggcacgcggagtgtgaggccacgcatgagcggacgctaaccccctccccagccacaaagagtctacatgtctagggtctagacatgttcagctttgtggacctccggctcctgctcctcttagcggccaccgccctcctgacgcacggccaagaggaaggccaagtcgagggccaagacgaagacatcccaccaatcacctgcgtacagaacggcctcaggtaccatgaccgagacgtgtggaaacccgagccctgccggatctgcgtctgcgacaacggcaaggtgttgtgcgatgacgtgatctgtgacgagaccaagaactgccccggcgccgaagtccccgagggcgagtgctgtcccgtctgccccgacggctcagagtcacccaccgaccaagaaaccaccggcgtcgagggacccaagggagacactggcccccgaggcccaaggggacccgcaggcccccctggccgagatggcatccctggacagcctggacttcccggaccccccggaccccccggacctcccggaccccctggcctcggaggaaactttgctccccagctgtcttatggctatgatgagaaatcaaccggaggaatttccgtgcctggccccatgggtccctctggtcctcgtggtctccctggcccccctggtgcacctggtccccaaggcttccaaggtccccctggtgagcctggcgagcctggagcttcaggtcccatgggtccccgaggtcccccaggtccccctggaaagaatggagatgatggggaagctggaaaacctggtcgtcctggtgagcgtgggcctcctgggcctcagggtgctcgaggattgcccggaacagctggcctccctggaatgaagggacacagaggtttcagtggtttggatggtgccaagggagatgctggtcctgctggtcctaagggtgagcctggcagccctggtgaaaatggagctcctggtcagatgggcccccgtggcctgcctggtgagagaggtcgccctggagcccctggccctgctggtgctcgtggaaatgatggtgctactggtgctgccgggccccctggtcccaccggccccgctggtcctcctggcttccctggtgctgttggtgctaagggtgaagctggtccccaagggccccgaggctctgaaggtccccagggtgtgcgtggtgagcctggcccccctggccctgctggtgctgctggccctgctggaaaccctggtgctgatggacagcctggtgctaaaggtgccaatggtgctcctggtattgctggtgctcctggcttccctggtgcccgaggcccctctggaccccagggccccggcggccctcctggtcccaagggtaacagcggtgaacctggtgctcctggcagcaaaggagacactggtgctaagggagagcctggccctgttggtgttcaaggaccccctggccctgctggagaggaaggaaagcgaggagctcgaggtgaacccggacccactggcctgcccggaccccctggcgagcgtggtggacctggtagccgtggtttccctggcgcagatggtgttgctggtcccaagggtcccgctggtgaacgtggttctcctggccccgctggccccaaaggatctcctggtgaagctggtcgtcccggtgaagctggtctgcctggtgccaagggtctgactggaagccctggcagccctggtcctgatggcaaaactggcccccctggtcccgccggtcaagatggtcgccccggacccccaggcccacctggtgcccgtggtcaggctggtgtgatgggattccctggacctaaaggtgctgctggagagcccggcaaggctggagagcgaggtgttcccggaccccctggcgctgtcggtcctgctggcaaagatggagaggctggagctcagggaccccctggccctgctggtcccgctggcgagagaggtgaacaaggccctgctggctcccccggattccagggtctccctggtcctgctggtcctccaggtgaagcaggcaaacctggtgaacagggtgttcctggagaccttggcgcccctggcccctctggagcaagaggcgagagaggtttccctggcgagcgtggtgtgcaaggtccccctggtcctgctggaccccgaggggccaacggtgctcccggcaacgatggtgctaagggtgatgctggtgcccctggagctcccggtagccagggcgcccctggccttcagggaatgcctggtgaacgtggtgcagctggtcttccagggcctaagggtgacagaggtgatgctggtcccaaaggtgctgatggctctcctggcaaagatggcgtccgtggtctgaccggccccattggtcctcctggccctgctggtgcccctggtgacaagggtgaaagtggtcccagcggccctgctggtcccactggagctcgtggtgcccccggagaccgtggtgagcctggtccccccggccctgctggctttgctggcccccctggtgctgacggccaacctggtgctaaaggcgaacctggtgatgctggtgccaaaggcgatgctggtccccctgggcctgccggacccgctggaccccctggccccattggtaatgttggtgctcctggagccaaaggtgctcgcggcagcgctggtccccctggtgctactggtttccctggtgctgctggccgagtcggtcctcctggcccctctggaaatgctggaccccctggccctcctggtcctgctggcaaagaaggcggcaaaggtccccgtggtgagactggccctgctggacgtcctggtgaagttggtccccctggtccccctggccctgctggcgagaaaggatcccctggtgctgatggtcctgctggtgctcctggtactcccgggcctcaaggtattgctggacagcgtggtgtggtcggcctgcctggtcagagaggagagagaggcttccctggtcttcctggcccctctggtgaacctggcaaacaaggtccctctggagcaagtggtgaacgtggtccccccggtcccatgggcccccctggattggctggaccccctggtgaatctggacgtgagggggctcctgctgccgaaggttcccctggacgagacggttctcctggcgccaagggtgaccgtggtgagaccggccccgctggaccccctggtgctcctggtgctcctggtgcccctggccccgttggccctgctggcaagagtggtgatcgtggtgagactggtcctgctggtcccgccggtcccgtcggccccgtcggcgcccgtggccccgccggaccccaaggcccccgtggtgacaagggtgagacaggcgaacagggcgacagaggcataaagggtcaccgtggcttctctggcctccagggtccccctggccctcctggctctcctggtgaacaaggtccctctggagcctctggtcctgctggtccccgaggtccccctggctctgctggtgctcctggcaaagatggactcaacggtctccctggccccattgggccccctggtcctcgcggtcgcactggtgatgctggtcctgttggtccccccggccctcctggacctcctggtccccctggtcctcccagcgctggtttcgacttcagcttcctgccccagccacctcaagagaaggctcacgatggtggccgctactaccgggctgatgatgccaatgtggttcgtgaccgtgacctcgaggtggacaccaccctcaagagcctgagccagcagatcgagaacatccggagcccagagggaagccgcaagaaccccgcccgcacctgccgtgacctcaagatgtgccactctgactggaagagtggagagtactggattgaccccaaccaaggctgcaacctggatgccatcaaagtcttctgcaacatggagactggtgagacctgcgtgtaccccactcagcccagtgtggcccagaagaactggtacatcagcaagaaccccaaggacaagaggcatgtctggttcggcgagagcatgaccgatggattccagttcgagtatggcggccagggctccgaccctgccgatgtggccatccagctgaccttcctgcgcctgatgtccaccgaggcctcccagaacatcacctaccactgcaagaacagcgtggcctacatggaccagcagactggcaacctcaagaaggccctgctcctcaagggctccaacgagatcgagatccgcgccgagggcaacagccgcttcacctacagcgtcactgtcgatggctgcacgagtcacaccggagcctggggcaagacagtgattgaatacaaaaccaccaagtcctcccgcctgcccatcatcgatgtggcccccttggacgttggtgccccagaccaggaattcggcttcgacgttggccctgtctgcttcctgtaaactccctccatcccaacctggctccctcccacccaaccaactttccccccaacccggaaacagacaagcaacccaaactgaacccccccaaaagccaaaaaatgggagacaatttcacatggactttggaaaatatttttttcctttgcattcatctctcaaacttagtttttatctttgaccaaccgaacatgaccaaaaaccaaaagtgcattcaaccttaccaaaaaaaaaaaaaaaaaaaaaagaataaataaataagtttttaaaaaaggaagcttggtccacttgcttgaagacccatgcgggggtaagtccctttctgcccgttgggttatgaaaccccaatgctgccctttctgctcctttctccacaccccccttggcctcccctccactccttcccaaatctgtctccccagaagacacaggaaacaatgtattgtctgcccagcaatcaaaggcaatgctcaaacacccaagtggcccccaccctcagcccgctcctgcccgcccagcacccccaggccctggggacctggggttctcagactgccaaagaagccttgccatctggcgctcccatggctcttgcaacatctccccttcgtttttgagggggtcatgccgggggagccaccagcccctcactgggttcggaggagagtcaggaagggccacgacaaagcagaaacatcggatttggggaacgcgtgtcatcccttgtgccgcaggctgggcgggagagactgttctgttctgttccttgtgtaactgtgttgctgaaagactacctcgttcttgtcttgatgtgtcaccggggcaactgcctgggggcggggatgggggcagggtggaagcggctccccatttttataccaaaggtgctacatctatgtgatgggtggggtggggagggaatcactggtgctatagaaattgagatgcccccccaggccagcaaatgttcctttttgttcaaagtctatttttattccttgatattttttctttctttttttttttttttgtggatggggacttgtgaatttttctaaaggtgctatttaacatgggaggagagcgtgtgcgctccagcccagcccgctgctcactttccaccctctctccacctgcctctggcttctcaggcctctgctctccgacctctctcctctgaaaccctcctccacagctgcagcccatcctcccggctccctcctagtctgtcctgcgtcctctgtccccgggtttcagagacaacttcccaaagcacaaagcagtttttccctaggggtgggaggaagcaaaagactctgtacctattttgtatgtgtataataatttgagatgtttttaattattttgattgctggaataaagcatgtggaaatgacccaaacataa

SEQ ID NO: 145 - DNA, 4816 bp, Homo sapiens
  mRNA (1)..(4816): gi|33620774|ref|NM_182926.1| Homo sapiens kinectin 1 (kinesin receptor) (KTN1)
cgtcttcccggtctcctttcccggccgcacagggtagattttcgttccgtcacccaggctggagtgcagtggtgtgaccttggcttgctgcaaccctttgcctcctgggttcaagtgattctcattgcctcagcctcctaagtagctgggattacaggttttataggatcacattgacaaaagtaccatggagttttatgagtcagcatattttattgttcttattccttcaatagttattacagtaattttcctcttcttctggcttttcatgaaagaaacattatatgatgaagttcttgcaaaacagaaaagagaacaaaagcttattcctaccaaaacagataaaaagaaagcagaaaagaaaaagaataaaaagaaagaaatccagaatggaaacctccatgaatccgactctgagagtgtacctcgagactttaaattatcagatgctttggcagtagaagatgatcaagttgcacctgttccattgaatgtcgttgaaacttcaagtagtgttagggaaagaaaaaagaaggaaaagaaacaaaagcctgtgcttgaagagcaggtcatcaaagaaagtgacgcatcaaagattcctggcaaaaaagtagaacctgtcccagttactaaacagcccacccctccctctgaagcagctgcctcgaagaagaaaccagggcagaagaagtctaaaaatggaagcgatgaccaggataaaaaggtggaaactctcatggtaccatcaaaaaggcaagaagcattgcccctccaccaagagactaaacaagaaagtggatcagggaagaagaaagcttcatcaaagaaacaaaagacagaaaatgtcttcgtagatgaaccccttattcatgcaactacttatattcctttgatggataatgctgactcaagtcctgtggtagataagagagaggttattgatttgcttaaacctgaccaagtagaagggatccagaaatctgggactaaaaaactgaagaccgaaactgacaaagaaaatgctgaagtgaagtttaaagattttcttctgtccttgaagactatgatgttttctgaagatgaggctctttgtgttgtagacttgctaaaggagaagtctggtgtaatacaagatgctttaaagaagtcaagtaagggagaattgactacgcttatacatcagcttcaagaaaaggacaagttactcgctgctgtgaaggaagatgctgctgctacaaaggatcggtgtaagcagttaacccaggaaatgatgacagagaaagaaagaagcaatgtggttataacaaggatgaaagatcgaattggaacattagaaaaggaacataatgtatttcaaaacaaaatacatgtcagttatcaagagactcaacagatgcagatgaagtttcagcaagttcgtgagcagatggaggcagagatagctcacttgaagcaggaaaatggtatactgagagatgcagtcagcaacactacaaatcaactggaaagcaagcagtctgcagaactaaataaactacgccaggattatgctaggttggtgaatgagctgactgagaaaacaggaaagctacagcaagaggaagtccaaaagaagaatgctgagcaagcagctactcagttgaaggttcaactacaagaagctgagagaaggtgggaagaagttcagagctacatcaggaagagaacagcggaacatgaggcagcacagcaagatttacagagtaaatttgtggccaaagaaaatgaagtacagagtctgcatagtaagcttacagataccttggtatcaaaacaacagttggagcaaagactaatgcagttaatggaatcagagcagaaaagggtgaacaaagaagagtctctacaaatgcaggttcaggatattttggagcagaatgaggctttgaaagctcaaattcagcagttccattcccagatagcagcccagacctccgcttcagttctagcagaagaattacataaagtgattgcagaaaaggataagcagataaaacagactgaagattctttagcaagtgaacgtgatcgtttaacaagtaaagaagaggaacttaaggatatacagaatatgaatttcttattaaaagctgaagtgcagaaattacaggccctggcaaatgagcaggctgctgctgcacatgaattggagaagatgcaacaaagtgtttatgttaaagatgataaaataagattgctggaagagcaactacaacatgaaatttcaaacaaaatggaagaatttaagattctaaatgaccaaaacaaagcattaaaatcagaagttcagaagctacagactcttgtttctgaacagcctaataaggatgttgtggaacaaatggaaaaatgcattcaagaaaaagatgagaagttaaagactgtggaagaattacttgaaactggacttattcaggtggcaactaaagaagaggagctgaatgcaataagaacagaaaattcatctctgacaaaagaagttcaagacttaaaagctaagcaaaatgatcaggtttcttttgcctctctagttgaagaacttaagaaagtgatccatgagaaagatggaaagatcaagtctgtagaagagcttctggaggcagaacttctcaaagttgctaacaaggagaaaactgttcaggatttgaaacaggaaataaaggctctaaaagaagaaataggaaatgtccagcttgaaaaggctcaacagttatctatcacttccaaagttcaggagcttcagaacttattaaaaggaaaagaggaacagatgaataccatgaaggctgttttggaagagaaagagaaagacctagccaatacagggaagtggttacaggatcttcaagaagaaaatgaatctttaaaagcacatgttcaggaagtagcacaacataacttgaaagaggcctcttctgcatcacagtttgaagaacttgagattgtgttgaaagaaaaggaaaatgaattgaagaggttagaagccatgctaaaagagagggagagtgatctttctagcaaaacacagctgttacaggatgtacaagatgaaaacaaattgtttaagtcccaaattgagcagcttaaacaacaaaactaccaacaggcatcttcttttccccctcatgaagaattattaaaagtaatttcagaaagagagaaagaaataagtggtctctggaatgagttagattctttgaaggatgcagttgaacaccagaggaagaaaaacaatgaccttcgggagaaaaactgggaagcaatggaagcattggcatcaactgaaaaaatgctgcaggacaaagtgaacaagacttccaaggaaaggcagcaacaggtggaagctgttgagttggaggctaaagaagttctcaaaaaattatttccaaaggtgtctgtcccttctaatttgagttatggtgaatggttgcatggatttgaaaaaaaggcaaaagaatgtatggctggaacttcagggtcagaggaggttaaggttctagagcacaagttgaaagaagctgatgaaatgcacacattgttacagctagagtgtgaaaaatacaaatccgtccttgcagaaacagaaggaattttacagaagctacagagaagtgttgagcaagaagaaaataaatggaaagttaaggtcgatgaatcacacaagactattaaacagatgcagtcatcatttacatcttcagaacaagagctagagcgattaagaagcgaaaataaggatattgaaaatctgagaagagaacgagaacatttggaaatggaactagaaaaggcagagatggaacgatctacctatgttacagaagtcagagagctgaaagatctgttgactgaattgcagaaaaaacttgatgattcatattctgaagcagtaagacagaatgaagagctaaatttgttgaaggcacagttaaatgaaacactcacaaaacttagaactgaacaaaatgaaagacagaaggtagctggtgatttgcataaggctcaacagtcactggagcttatccagtcaaaaatagtaaaagctgctggagacactactgttattgaaaatagtgatgtttccccagaaacggagtcttctgagaaggagacaatgtctgtaagtctaaatcagactgtaacacagttacagcagttgcttcaggcggtaaaccaacagctcacaaaggagaaagagcactaccaggtgttagagtgatcatcctctggcctaccttgacacatgctctccttcaaaatgctaattcagagtgaagtaattgggaaactgttcatttgaggataaaaaaggcattgtattatattttgccaaattaaagccttatttatgttttcaccctttctactttgtcagaaacactgaacagagttttgtcttttctaatccttgttagactactgatttaaagaaggaaaaaaaaaagccaactctgtagacaccttcagagtttagttttataataaaaactgtttgaataattagacctttacattcctgaagataaacatgtaatcttttatcttattttgctcaataaaattgttcagaagatcaaagtggtaaagacaatgtaaaatttaacattttaatactgatgttgtacactgttttacttaacattttgggaagtaactgcctctgacttcaactcaagaaaacacttttttgttgctaatgtaatcggtttttgtaatggcgtcagcaaataaaaggatgcttattattcaaaaaaaaaaaaaaaaaaaaaaaaaa

SEQ ID NO: 146 - DNA, 2221 bp, Homo sapiens
  mRNA (1)..(2221): gi|66346720|ref|NM_004563.2| Homo sapiens phosphoenolpyruvate carboxykinase 2 (mitochondrial) (PCK2)
ccccctcctttttaagcgcctcccgccagcctctgctgtggctcgcttcgccgcgctccctccttccccgccttccatacctccccggctccgctcggttcctggccaccccgcagcccctgcccaggtgccatggccgcattgtaccgccctggcctgcggcttaactggcatgggctgagccccttgggctggccatcatgccgtagcatccagaccctgcgagtgcttagtggagatctgggccagcttcccactggcattcgagattttgtagagcacagtgcccgcctgtgccaaccagagggcatccacatctgtgatggaactgaggctgagaatactgccacactgaccctgctggagcagcagggcctcatccgaaagctccccaagtacaataactgctggctggcccgcacagaccccaaggatgtggcacgagtagagagcaagacggtgattgtaactccttctcagcgggacacggtacaactcccgcctggtggggcccgtgggcagctgggcaactggatgtccccagctgatttccagcgagctgtggatgagaggtttccaggctgcatgcagggccgcaccatgtatgtgcttccattcagcatgggtcctgtgggctccccgctgtcccgcatcggggtgcagctcactgactcagcctatgtggtggcaagcatgcgtattatgacccgactggggacacctgtgcttcaggccctgggagatggtgactttgtcaagtgtctgcactccgtgggccagcccctgacaggacaaggggagccagtgagccagtggccgtgcaacccagagaaaaccctgattggccacgtgcccgaccagcgggagatcatctccttcggcagcggctatggtggcaactccctgctgggcaagaagtgctttgccctacgcatcgcctctcggctggcccgggatgagggctggctggcagagcacatgctgatcctgggcatcaccagccctgcagggaagaagcgctatgtggcagccgccttccctagtgcctgtggcaagaccaacctggctatgatgcggcctgcactgccaggctggaaagtggagtgtgtgggggatgatattgcttggatgaggtttgacagtgaaggtcgactccgggccatcaaccctgagaacggcttctttggggttgcccctggtacctctgccaccaccaatcccaacgccatggctacaatccagagtaacactatttttaccaatgtggctgagaccagtgatggtggcgtgtactgggagggcattgaccagcctcttccacctggtgttactgtgacctcctggctgggcaaaccctggaaacctggtgacaaggagccctgtgcacatcccaactctcgattttgtgccccggctcgccagtgccccatcatggacccagcctgggaggccccagagggtgtccccattgacgccatcatctttggtggccgcagacccaaaggggtacccctggtatacgaggccttcaactggcgtcatggggtgtttgtgggcagcgccatgcgctctgagtccactgctgcagcagaacacaaagggaagatcatcatgcacgacccatttgccatgcggcccttttttggctacaacttcgggcactacctggaacactggctgagcatggaagggcgcaagggggcccagctgccccgtatcttccatgtcaactggttccggcgtgacgaggcagggcacttcctgtggccaggctttggggagaatgctcgggtgctagactggatctgccggcggttagagggggaggacagtgcccgagagacacccattgggctggtgccaaaggaaggagccttggatctcagcggcctcagagctatagacaccactcagctgttctccctccccaaggacttctgggaacaggaggttcgtgacattcggagctacctgacagagcaggtcaaccaggatctgcccaaagaggtgttggctgagcttgaggccctggagagacgtgtgcacaaaatgtgacctgaggccctagtctagcaagaggacatagcaccctcatctgggaatagggaaggcaccttgcagaaaatatgagcaatttgatattaactaacatcttcaatgtgccatagaccttcccacaaagactgtccaataataagagatgcttatctattttacacaa

SEQ ID NO: 147 - DNA, 4957 bp, Homo sapiens
  mRNA (1)..(4957): gi|68299753|ref|NM_014612.3| Homo sapiens chromosome 9 open reading frame 10 (C9orf10)
ccgcgcccgcgcccccgccgccgccatgggcgtgcagggcttccaggactacatcgagaagcactgcccgagcgccgtggtgccggtggagctgcagaagctggcccggggcagcctggtgggcggcgggcggcagcggcccccgcagaccccgctgcgcctgctggtggacgccgacaactgcctgcaccgcctctacggcggcttctacaccgactgggtcagcggcggccagtggaaccacatgcttggctacctggcggcgctggccaaggcctgcttcggcggcaacatcgagctcttcgtcttcttcaacggcgcgctcgagaaggcccggctgcacgagtgggtcaagcggcagggcaacgagcgccagacggcacagcagatcgtcagccatgtccagaacaagggcaccccgccgccaaaggtctggttcctgccgcccgtctgcatggcccactgcatccgcctggcgctcatccgcttccacgtcaaggttgcacagagcattgaggatcaccatcaggaagtgattggtttctgcagagagaatggtttccatggcttggttgcgtatgactctgattatgcactgtgcaacatcccctactatttcagtgcccatgccctaaaactgagccggaacgggaaaagtctcaccacaagccaatatctgatgcatgaagttgccaagcaactggacctgaatccaaatcgttttcctatttttgctgctctcttaggaaatcacattctgcctgatgaagatctggcttcctttcactggagtttacttggtccagaacatccactagcctcactaaaggtccgggcccaccagctggtcttgccaccttgcgacgtagtgatcaaagccgttgctgactatgtacgcaacattcaggacacctctgacttggatgccatagctaaagatgttttccagcattcacagtctagaacagatgacaaagttattcgatttaagagagcaattggatattattcagcgactagtaagcctatgtcatttcatccaccacattacttagcagccagacccggtccgtttggaatgcctgggatggtgccgccgcatgttcctcctcagatgctcaacattccgcagacctctctgcaagcaaagcccgtggccccacaggtgcccagcccagggggcgccccgggccagggtccatacccgtacagcctctctgagccagcacctctcactttggacacgagcgggaagaatctgacggagcagaacagctacagcaacattcctcacgaagggaagcacacgccgctgtatgagcggtcctcgcccatcaacccggcccagagcggcagccccaaccacgtggattccgcctacttccctggctcttctacatcgtcatcttccgacaacgacgagggcagcggaggggcgacaaaccatatcagcgggaacaagattggctgggagaagacgggaagccactcagagcctcaggcacgaggagacccaggagaccaaacaaaggcagaaggctcgtccactgcctcttcaggaagccaactagccgaaggcaagggaagccagatgggcactgtccagccaatcccgtgcctcctgtcgatgcccaccaggaaccacatggacatcaccacacctcccctgccccccgtcgcacctgaggtgctgagagtggccgagcacaggcacaagaaggggctgatgtacccctacatcttccatgtcctgacgaagggtgaaatcaaaattgctgtttctattgaagatgaagccaacaaggacctgcctccggccgctctgctctataggccagttcgtcagtatgtttacggagtcctgtttagtttggcagaaagcagaaagaaaactgagagacttgcttttagaaagaacagacttccaccagaattttcaccagtgatcattaaagaatgggcagcttacaaaggaaagtctcctcaaaccccggaactggttgaagctcttgccttcagggagtggacctgccccaacctgaagaggctgtggttgggtaaggcggtagaggacaagaaccgcaggatgagggccttcctggcctgcatgaggtcggacaccccagccatgctcaaccctgccaacgtgcccactcacctcatggtgctctgctgcgtcttacggtacatggtgcagtggccgggagcacgcatccttcggcgtcaggagctagatgccttcctggctcaggcgctgtcccccaaactctacgagcctgatcagctccaggagctcaagattgagaacctagatccccgaggaattcagctatcagctctcttcatgagtggagtagacatggccttgtttgcaaatgatgcatgcggacagccaatcccctgggaacactgttgtccttggatgtattttgatgggaagctcttccaatccaaactcctcaaagccagccgggaaaagaccccactcattgacctctgtgatggtcaggctgatcaggctgccaaggtagagaagatgcgccagagcgtcctcgaggggctcagcttctccaggcagagccacacgctccctttcccgccgccacctgccctgcccttctaccctgcctctgcgtacccccggcactttgggcctgtcccaccctctcagggcaggggcagaggctttgcaggcgtctgtggctttggaggcccctatggggaaacggtagcaacaggcccttaccgtgccttccgtgtggcggcagcatcgggacactgcggagccttctcaggcagtgacagcagcaggactagcaagtcccagggcggagtccaacctataccttctcagggaggcaaactagaaatagctggcactgtggttggccattgggctgggagcaggcggggccgtgggggccgggggcctttccccctgcaggtggtttctgtcggaggaccagctagagggcgtccaagaggagttatttccaccccagtgattagaacatttggaagaggtggaaggtactatggcagaggttacaaaaaccaggcagcaattcagggcagacctccttatgctgcttcagcagaagaagtggccaaagaacttaagtcaaaatctggggaatcgaagtcctctgctatgtcttcagacgggtccctggctgaaaacggagtgatggccgaggagaagccggctccccagatgaacgggagcacgggtgacgccagggcccccagccactctgaaagtgccttgaataatgactctaaaacgtgcaatacaaatcctcatttaaatgcactaagtacagacagcgcttgccgcagagaagctgctctggaggcagctgtcttaaataaagaagagtaaacttattttttatagagggtgaaggatgctggaagggtaaggatttaggaatatctggagagaaagagagcctgcagttatgtacattttgtcctttccgtaagagaaaaatgaggactttggaaattcagatccctctttgatatcagagatttaaacaacacatttttagttttaaccagttgtagtcaaaatgctacaataaaacaaaaaagagaaagaaaatgaagagcatttgactcccgcacttaaaatgaagtacacataaagtttaaactggttatgacaaaagcctttagttgtgtttcttgaactataaagaaaacaaattttggcagtctttaagtatatatagcttaaaatataatttttagcatttggcaccatatgtatgccattatatttgattttgcattactgtttcacaatgaagctttctttaaggctttgatttttatgattatgaaagaaataaggcacaaccacagtttttctttcttaaatttcatcactgttgatgtggttcttttgtgttaaaaaaaaaaagtgcaactatcaaaactaaaaaattatagagtaatattgccgttctgctgattttaaatatacaatacatcatacatactttacaagcaagttaaatggagataaagttgaaatcatagaagatgcaaatgacctttcaaaatcaacacaatgtgttctgaaactttcgtgactaataccatgcatctgtgatcaatgaactatgtggttttgaatcggatgtagaccattagtactactacttgagctaaacttctgcatggttcataatttttaaagtgtgtagttaatatgcatgttatcgtcctttcttccattcttaacagtatgtgcccatttgcaaaacaaaaatgctaataatcagtaatagtcctataaaagatgttaactctgtttagtcattgactgatcttgctctaaccttaaaattttgtgattattgacctctgttgcatttattctaaagccccccaaaaattatctagccgtttcgaatatcaacattaccctggtgtattcactgctgtatgcattattgttctttgttgctgttttatgccttcatattagcaaatatgaaattctgtgaaaaaaaaccctttgatcttaaaaaaaaaaaaaccaccccccccttctgtagcaggaaacaaattgcttgttcttgagaactttcccatcaagaatttagtagaagcaggtatacttctatcattttgatgtttttgttaatgtttccaaacaatgtactttgaaatcagaatcacttcttatcgttttcatatacttctgatgctcttcatcacattagtgatcagaaatgaggtgtaattccccaacccctgcccgcaagagctaagtaggatcttactgtaagttgaagggagttttgccctaactcatggattgtgcaagaatgaactgctgttgggtttgattgactgtcgatggattgtggtgtggtgtatctgaaggctattgaatgcaacttacaatgcttaataaaaatctttattcttttagtataaagta

SEQ ID NO: 148 - DNA, 5021 bp, Homo sapiens
  mRNA (1)..(5021): gi|62241041|ref|NM_004446.2| Homo sapiens glutamyl-prolyl-tRNA synthetase (EPRS)
agcacgaaaggccacgcaggccgttctaaccctggcggccaagaggaggggtagcaggctctggaacctgcgggcggggacgaagacggcgcgcgacgatgtcgcaccgcggcgtgcgcggtgtcggcagtagctgcggcgcaggggcggagcgaaggctgcggcggcgtcgggtacgcgcacacgttgcatcttcttcctttcgcggggtcctccgtagttctggcacgagccaggcgtactgacaggtggaccagcggactggtggagatggcgacgctctctctgaccgtgaattcaggagaccctccgctaggagctttgctggcagtagaacacgtgaaagacgatgtcagcatttccgttgaagaagggaaagagaatattcttcatgtttctgaaaatgtgatattcacagatgtgaattctatacttcgctacttggctagagttgcaactacagctgggttatatggctctaatctgatggaacatactgagattgatcactggttggagttcagtgctacaaaattatcttcatgtgattcctttacttctacaattaatgaactcaatcattgcctgtctctgagaacatacttagttggaaactccttgagtttagcagatttatgtgtttgggccaccctaaaaggaaatgctgcctggcaagaacagttgaaacagaagaaagctccagttcatgtaaaacgttggtttggctttcttgaagcccagcaggccttccagtcagtaggtaccaagtgggatgtttcaacaaccaaagctcgagtggcacctgagaaaaagcaagatgttgggaaatttgttgagcttccaggtgcggagatgggaaaggttaccgtcagatttcctccagaggccagtggttacttacacattgggcatgcaaaagctgctcttctgaaccagcactaccaggttaactttaaagggaaactgatcatgagatttgatgacacaaatcctgaaaaagaaaaggaagattttgagaaggttatcttggaagatgttgcaatgttgcatatcaaaccagatcaatttacttatacttcggatcattttgaaactataatgaagtatgcagagaagctaattcaagaagggaaggcttatgtggatgatactcctgctgaacagatgaaagcagaacgtgagcagaggatagactctaaacatagaaaaaaccctattgagaagaatctacaaatgtgggaagaaatgaaaaaagggagccagtttggtcagtcctgttgtttgcgagcaaaaattgacatgagtagtaacaatggatgcatgagagatccaaccctttatcgctgcaaaattcaaccacatccaagaactggaaataaatacaatgtttatccaacatatgattttgcctgccccatagttgacagcatcgaaggtgttacacatgccctgagaacaacagaataccatgacagagatgagcagttttactggattattgaagctttaggcataagaaaaccatatatttgggaatatagtcggctaaatctcaacaacacagtgctatccaaaagaaaactcacatggtttgtcaatgaaggactagtagatggatgggatgacccaagatttcctacggttcgtggtgtactgagaagagggatgacagttgaaggactgaaacagtttattgctgctcagggctcctcacgttcagtcgtgaacatggagtgggacaaaatctgggcgtttaacaaaaaggttattgacccagtggctccacgatatgttgcattactgaagaaagaagtgatcccagtgaatgtacctgaagctcaggaggagatgaaagaagtagccaaacacccaaagaatcctgaggttggcttgaagcctgtgtggtatagtcccaaagttttcattgaaggtgctgatgcagagactttttcggagggtgagatggttacatttataaattggggcaacctcaacattacaaaaatacacaaaaatgcagatggaaaaatcatatctcttgatgcaaagttgaatttggaaaacaaagactacaagaaaaccactaaggtcacttggcttgcagagactacacatgctcttcctattccagtaatctgtgtcacttatgagcacttgatcacaaagccagtgctaggaaaagacgaggactttaagcagtatgtcaacaagaacagtaagcatgaagagctaatgctaggggatccctgccttaaggatttgaaaaaaggagatattatacaactccagagaagaggattcttcatatgtgatcaaccttatgaacctgttagcccatatagttgcaaggaagccccgtgtgttttgatatacattcctgatgggcacacaaaggaaatgccaacatcagggtcaaaggaaaagaccaaagtagaagccacaaaaaatgagacctctgctccttttaaggaaagaccaacaccttctctgaataataattgtactacatctgaggattccttggtcctttacaatagagtggctgttcaaggagatgtggttcgtgaattaaaagccaagaaagcaccaaaggaagatgtagatgcagctgtaaaacagcttttgtctttgaaagctgaatataaggagaaaactggccaggaatataaacctggaaaccctcctgctgaaataggacagaatatttcttctaattcctcagcaagtattctggaaagtaaatctctgtatgatgaagttgctgcacaaggggaggtggttcgtaagctaaaagctgaaaaatcccctaaggctaaaataaatgaagctgtagaatgcttactgtccctgaaggctcagtataaagaaaaaactgggaaggagtacatacctggtcagcccccattatctcaaagttcggattcaagcccaaccagaaattctgaacctgctggtttagaaacaccagaagcgaaagtactttttgacaaagtagcttctcaaggggaagtagttcggaaacttaaaactgaaaaagcccctaaggatcaagtagatatagctgttcaagaactccttcagctaaaggcacagtacaagtctttgataggagtagagtataagcctgtgtcggccactggagctgaggacaaagataagaagaagaaagaaaaagaaaataaatctgaaaagcagaataagcctcagaaacaaaatgatggccaaaggaaagacccttctaaaaaccaaggaggtgggctctcatcaagtggagcaggagaagggcaggggcctaagaaacagaccaggttgggtcttgaggcaaaaaaagaagaaaatcttgctgattggtattctcaggtcatcacaaagtcagaaatgattgaataccatgacataagtggctgttatattcttcgtccctgggcctatgccatttgggaagccatcaaggacttttttgatgctgagatcaagaaacttggtgttgaaaactgctacttccccatgtttgtgtctcaaagtgcattagagaaagagaagactcatgttgctgactttgccccagaggttgcttgggttacaagatctggcaaaaccgagctggcagaaccaattgccattcgtcctactagtgaaacagtaatgtatcctgcatatgcaaaatgggtacagtcacacagagacctgcccatcaagctcaatcagtggtgcaatgtggtgcgttgggaattcaagcatcctcagcctttcctacgtactcgtgaatttctttggcaggaagggcacagtgcttttgctaccatggaagaggcagcggaagaggtcttgcagatacttgacttatatgctcaggtatatgaagaactcctggcaattcctgttgttaaaggaagaaagacggaaaaggaaaaatttgcaggaggagactatacaactacaatagaagcatttatatctgctagtggaagagctatccagggaggaacatcacatcatttagggcagaatttttccaaaatgtttgaaatcgtttttgaagatccaaagataccaggagagaagcaatttgcctatcaaaactcctggggcctgacaactcgaactattggtgttatgaccatggttcatggggacaacatgggtttagtattaccaccccgtgtagcatgtgttcaggtggtgattattccttgtggcattaccaatgcactttctgaagaagacaaagaagcgctgattgcaaaatgcaatgattatcgaaggcgattactcagtgttaacatccgcgttagagctgatttacgagataattattctccaggttggaaattcaatcactgggagctcaagggagttcccattagacttgaagttgggccacgtgatatgaagagctgtcagtttgtagccgtcagacgagatactggagaaaagctgacagttgctgaaaatgaggcagagactaaacttcaagctattttggaagacatccaggtcacccttttcacaagggcttctgaagaccttaagactcatatggttgtggctaatacaatggaagactttcagaagatactagattctggaaagattgttcagattccattctgtggggaaattgactgtgaggactggatcaaaaagaccactgccagggatcaagatcttgaacctggtgctccatccatgggagctaaaagcctttgcatccccttcaaaccactctgtgaactgcagcctggagccaaatgtgtctgtggcaagaaccctgccaagtactacaccttatttggtcgcagctactgagggatgaacgaaagccccctcttcaactcctctcactttttaaagcattgatattagtatcttctcagatacagaccgttttatgattttttaaaaagtaaaagttctaaaatgaagtcacacaggacaattattcttatgcctaagttaacagtggataaaagacttttctgtaaacaactccagtaataaatatcatgaactaaaaaaaa

SEQ ID NO: 149 - DNA, 11784 bp, Homo sapiens
  mRNA (1)..(11784): gi|51492914|ref|XM_168585.5| PREDICTED: Homo sapiens similar to mucin 11 (LOC219612)
atgctggtgatctggattctgacgctggctctccggctctgcgcgtccgttactacagtgacaccaggctcaacagtaaacaccagtattggaggtaatacaacttctgcatccacacccagttcaagcgacccttttaccacctttagtgactatggggtgtcagtcacatttatcacgggctcaactgcaacaaaacacttccttgacagctccacaaactcaggccacagtgaggaatcaacagtatcccacagcggcccaggtgcaactggaacaacactcttcccttcccactctgcaacctcagtttttgttggagaacctaaaacctcacccatcacttcagcctcaatggaaacaacagcgttacctggcagtaccacaacagcaggcctgagtgagaaatctaccaccttctacagtagccccagatcaccagacagaacactctcacctgcccgcacgacaagctcaggcgtcagtgaaaaatcaaccacctcccacagccgaccaggcccaacgcacacaatagcgttccctgacagtaccaccatgccaggcgtcagtcaggaatctacagcttcccacagcatccccggctccacagacacaacactgtcccctggcactaccacaccatcatcccttggtccagaatctactaccttccacagcagcccaggctacactaaaacaacacgcttacctgacaacaccacaacctcaggcctccttgaagcatctacgcccgtccacagcagcactggatcgccacacacaacactgtccccttccagctctacaacccatgagggagaacctaccaccttccagagctggccaagctcaaaggacacttcgcctgcaccttctggtaccacatcagcctttgttaaactatctacaacttatcacagcagcccgagctcaactccaacaacccacttttctgccagctccacaaccttgggccatagtgaggaatcgacaccagtccacagcagcccagttgcaactgcaacaacacccccacctgcccgctccgcgacctcaggccatgttgaagaatctacagcctaccacaggagcccgggctcaactcaaacaatgcacttccctgaaagctccacaacttcaggccatagtgaagaatcagcaactttccacggcagcacaacacacacaaaatcttcaactcctagcaccacagctgccctagcacatacaagctaccacagcagcctgggctcaactgaaacaacacacttccgtgatagctccacaatctcaggccgtagtgaggaatcaaaagcatcccacagcagcccagatgcaatggcaacaacagtcttacctgccggctctacaccctcagttcttgttggagactcgacgccctcacccatcagttcaggctcaatggaaaccacagcgttacccggcagtaccacaaaaccaggcctcagtgagaaatctaccactttctacagtagccccagatcaccagacacaacacacttacctgccagcatgacaagctcaggcgtcaaacctaccagctaccacagcagcccgggctcaactgcaacaacacacttccctgacagctccacaacctcaggccgtagtgaggaatcaacagcatcgcacagcagccaagacgcaacgggaacaatagtcctacctgcccgctccacaacctcagttcttcttggagaatctacgacctcacccatcagttcaggctcaatggaaacgacagcgttacccggcagtaccacaacgccaggcctcagtgagagatctaccactttccatagtagccccagatcaccagccacaacactctcacctgccagcacgacaagctcaggcgtcagtgaagaatccaccacctcccgcagccgaccaggctcaacgcacacaacagcattccctgacagcaccaccacgccaggcctcagtcggcattctacaacttcccacagcagcccaggctcaacggatacaacactgttacctgccagcaccaccacctcaggccccagtcaggaatcaacaacttcccacagcagctcaggttcaactgacacagcactgtcccctggcagtaccacagccttatcctttggtcaagaatctacaaccttccacagcaacccaggctccactcacacaacactcttccctgacagcaccacaagctcaggcatcgttgaagcatctacacgcgtccacagcagcactggctcaccacgcacaacactgtcccctgccagctccacaagccctggacttcagggagaatctactgccttccagacccacccagcctcaactcacacaacgccttcacctcctagcaccgcaacagcccctgttgaagaatctacaacctaccaccgcagcccaggctcgactccaacaacacacttccctgccagctccacaacttcgggccacagtgagaaatcaacaatattccacagcagcccagatgcaagtggaacaacaccctcatctgcccactccacaacctcaggtcgtggagaatctacaacctcacgcatcagtccaggctcaactgaaataacaacgttacctggcagtaccacaacaccaggcctcagtgaggcatctaccaccttctacagcagccccagatcaccaaccacaacactctcacctgccagcatgacaagcctgggcgtcggtgaagaatccaccacctcccgtagccaaccaggttctactcactcaacagtgtcacctgccagcaccaccacgccaggcctcagtgaggaatctaccaccgtctacagcagcagccgaggctcaactgaaaccacagtgttccctcacagcaccacaacctcagttcatggtgaagagcctacaaccttccacagccggccagcctcaactcacacaacactgttcactgaggacagcaccacctcgggcctcactgaagaatctacagccttccccggcagcccagcctccacccaaacagggttacctgccacactcacaaccgcagacctcggtgaggaatcaactacctttcccagcagctcaggctcaactggaacaaaactctcacctgcccgctccaccacctctggcctcgttggagaatccacaccctcacgcctcagtccaagctcaaccgaaacaacaactttacctggcagtcccacaacaccaagcctcagtgagaaatcaaccaccttctacactagccccagatcaccagatgcaacactctcacctgcaaccacaacaagctcaggcgtcagcgaagaatccagcacatcccacagtcaaccaggctcaacgcacacaacagcattccctgacagcaccaccacctcagacctcagtcaggaacctacaacttcccacagcagccaaggctcaacagaggcaacactgtcccctggcagtaccacagcctcatcccttggtcaacaatctacaaccttccacagcagcccaggcgacactgaaaccacactcttacctgacgacaccataacctcaggcctcgtggaggcatctacacccacccacagcagcactggctcgctacacacaacactgacccctgccagctccacaagcgctggccttcaggaagaatctaccactttccagagctggccaagctcaagtgacacaacaccttcacctcccggcaccacagcagcccctgttgaagtatccacaacctaccacagccgcccgagctcaactccaacaacacacttttctgccagttccacaaccttgggccgtagtgaggaatcaacaacagtccacagcagcccaggtgcaactggaacagcactcttccctacccgctctgcaacctcagttcttgttggagaacctacaacgtcacccatcagttcaggctcaacggaaacaacagcgttacctggcagtaccacaacagcaggcctgagtgagaaatctaccaccttctacagtagccccagatcaccggacacaacactctcacctgccagcacgacaagctcaggcgtcagtgaagaatccaccacctcccacagccgaccaggctcaacgcacacaacagcattccctggcagtaccaccatgccaggcgtcagtcaggaatctacagcttcccacagcagcccaggctccacagacacaacattgtcccctggcagtaccacagcatcatcccttggtccagaatctactactttccacagcagcccaggctccactgaaacaacactcttacctgacaacaccacagcctcaggcctccttgaagcatctacgcccgtccacagcagcactggatcgccacacacaacactgtcccctgccggctctacaacacgtcagggagaatctaccaccttccagagctggccaagctcaaaggacactatgcctgcacctcctactaccacatcagcctttgttgagctatctacaacctcccacggcagcccgagctcaactccaacaacccacttttctgccagctccacaaccttgggccgtagtgaggaatcgacaacagtccacagcagcccagttgcaactgcaacaacaccctcgcctgcccgctccacaacctcaggcctcgttgaagaatctacggcgtaccacagcagcccgggctcaactcaaacaatgcacttccctgaaagctccacagcttcaggtcgtagtgaagaatcaagaacttcccacagcagcacaacacacacaatatcttcacctcctagcaccacatctgcccttgttgaagaacctaccagctaccacagcagcccgggctcaactgcaacaacacacttccctgacagctccacaacctcaggccgtagtgaggaatcaacagcatcccacagcagccaagacgcaacgggaacaatagtcctacctgcccgctccacaacctcagttcttcttggagaatctacgacctcacccatcagttcaggctcaatggaaacgacagcgttacccggcagtaccacaacgccaggcctcagtgagaaatctaccactttccacagtagccccagatcaccagccacaacactctcacctgccagcacgacaagctcaggcgtcagtgaagaatccaccacctcccacagccgaccaggctcaacgcacacaacagcattccctgacagcaccaccacgccaggcctcagtcggcattctacaacttcccacagcagcccaggctcaacggatacaacactgttacctgccagcaccaccacctcaggccccagtcaggaatcaacaacttcccacagcagcccaggttcaactgacacagcactgtcccctggcagtaccacagccttatcctttggtcaagaatctacaaccttccacagcagcccaggctccactcacacaacgctcttccctgacagcaccacaagctcaggcatcgttgaagcatctacacgcgtccacagcagcactggctcaccacgcacaacactgtcccctgccagctccacaagccctggacttcagggagaatctaccgccttccagacccacccagcctcaactcacacgacgccttcacctcctagcaccgcaacagcccctgttgaagaatctacaacctaccaccgcagcccaggctcgactccaacaacacacttccctgccagctccacaacttcgggccacagtgagaaatcaacaatattccacagcagcccagatgcaagtggaacaacaccctcatctgcccactccacaacctcaggtcgtggagaatctacaacctcacgcatcagtccaggctcaactgaaataacaacgttacctggcagtaccacaacaccaggcctcagtgaggcatctaccaccttctacagcagccccagatcaccaaccacaacactctcacctgccagtatgacaagcctaggcgtcggtgaagaatccaccacctcccgtagccaaccaggttctactcactcaacagtgtcacctgccagcaccaccacgccaggcctcagtgaggaatctaccaccgtctacagcagcagcccaggctcaactgaaaccacagtgttccctcgcacccccacaacctcagttcgtggtgaagagcctacaaccttccacagccggccagcctcaactcacacaacactgttcactgaggacagcaccacctcgggcctcactgaagaatctacagccttccccggcagcccagcctccacccaaacagggttacctgccacactcacaaccgcagacctcggtgaggaatcaactacctttcccagcagctcaggctcaactggaacaacactctcacctgcccgctccaccacctctggcctcgttggagaatccacaccctcacgcctcagtccaagctcaaccgaaacaacaactttacccggcagtcccacaacaccaagcctcagtgagaaatcaaccaccttctacactagccccagatcaccagatgcaacactctcacctgcaaccacaacaagctcaggcgtcagtgaagaatccagcacatcccacagtcaaccaggctcaacgcacacaacagcattccctgacagcaccaccacgccaggcctcagtcggcattctacaacttcccacagcagcccaggctcaacggatacaacactgttacctgccagcaccaccacctcaggccccagtcaggaatcaacaacttcccacagcagcccaggttcaactgacacagcactgtcccctggcagtaccacagccttatcctttggtcaagaatctacaaccttccacagcagcccaggctccactcacacaacactcttccctgacagcaccacaagctcaggcatcgttgaagcatctacacgcgtccacagcagcactggctcaccacgcacaacactgtcccctgccagctccacaagccctggacttcagggagaatctaccaccttccagacccacccagcctcaactcacacgacgccttcacctcctagcaccgcaacagcccctgttgaagaatctacaacctaccaccgcagcccaggctcgactccaacaacacacttccctgccagctccacaacttcgggccacagtgagaaatcaacaatattccacagcagcccagatgcaagtggaacaacaccctcatctgcccactccacaacctcaggtcgtggagaatctacaacctcacgcatcagtccaggctcaactgaaataacaacgttacctggcagtaccacaacaccaggcctcagtgaggcatctaccaccttctacagcagccccagatcaccaaccacaacactctcacctgccagtatgacaagcctaggcgtcggtgaagaatccaccacctcccgtagccaaccaggttctactcactcaacagtgtcacctgccagcaccaccacgccaggcctcagtgaggaatctaccaccgtctacagcagcagcccaggctcaactgaaaccacagtgttccctcgcagcaccacaacctcagttcgtggtgaagagcctacaaccttccacagccggccagcctcaactcacacaacactgttcactgaggacagcaccacctcgggcctcactgaagaatctacagccttccccggcagcccagcctccacccaaacagggttacctgccacactcacaaccgcagacctcggtgaggaatcaactacctttcccagcagctcaggctcaactggaacaacactctcacctgcccgctccaccacctctggcctcgttggagaatccacaccctcacgcctcagtccaagctcaaccgaaacaacaactttacccggcagtcccacaacaccaagcctcagtgagaaatcaaccaccttctacactagccccagatcaccagatgcaacactctcacctgcaaccacaacaagctcaggcgtcagtgaagaatccagcacatcccacagtcaaccaggctcaacgcacacaacagcgttccctgacagcaccaccacctcaggcctcagtcaggaacctacagcttcccacagcagccaaggctcaacagaggcaacactgtcccctggcagtaccacagcctcatcccttggtcaacaatctacaaccttccacagcagcccaggcgacactgaaaccacactcttacctgacgacaccataacctcaggcctcgtggaggcatctacacccacccacagcagcactggctcgctacacacaacactgacccctgccagctccacaagcgctggccttcaggaagaatctaccactttccagagctggccaagctcaagtgacacaacaccttcacctcccggcaccacagcagcccctgttgaagtatccacaacctaccacagccgcccgagctcaactccaacaacacacttttctgccagttccacaaccttgggccgtagtgaggaatcaacaacagtccacagcagcccaggtgcaactggaacagcactcttccctacccgctctgcaacctcagttcttgttggagaacctacaacgtcacccatcagttcaggctcaacggaaacaacagcgttacctggcagtaccacaacagcaggcctgagtgagaaatctaccaccttctacagtagccccagatcaccggacacaacactctcacctgccagcacgacaagctcaggcgtcagtgaagaatccaccacctcccacagccgaccaggctcaacgcacacaacagcattccctggcagtaccaccatgccaggcgtcagtcaggaatctacagcttcccacagcagcccaggctccacagacacaacactgtcccctggcagtaccacagcatcatcccttggtccagaatctactaccttccacagcggcccaggctccactgaaacaacactcttacctgacaacaccacagcctcaggcctccttgaagcatctacgcccgtccacagcagcactggatcgccacacacaacactgtcccctgccggctctacaacccgtcagggagaatctaccaccttccagagctggcctaactcgaaggacactacccctgcacctcctactaccacatcagcctttgttgagctatctacaacctcccacggcagcccgagctcaactccaacaacccacttttctgccagctccacaaccttgggccgtagtgaggaatcgacaacagtccacagcagcccagttgcaactgcaacaacaccctcgcctgcccgctccacaacctcaggcctcgttgaagaatctacgacctaccacagcagcccgggctcaactcaaacaatgcacttccctgaaagcgacacaacttcaggccgtggtgaagaatcaacaacttcccacagcagcacaacacacacaatatcttcagctcctagcaccacatctgcccttgttgaagaacctaccagctaccacagcagcccgggctcaactgcaacaacacacttccctgacagctccacaacctcaggccgtagtgaggaatcaacagcatcccacagcagccaagacgcaacgggaacaatagtcctacctgcccgctccacaacctcagttcttcttggagaatctacgacctcacccatcagttcaggctcaatggaaacgacagcgttacccggcagtaccacaacgccaggcctcagtgagaaatctaccactttccacagtagccccagatcaccagccacaacactctcacctgccagcacgacaagctcaggcgtcagtgaagaatccaccacctcccacagccgaccaggctcaacgcacacaacagcattccctgacagcaccaccacgccaggcctcagtcggcattctacaacttcccacagcagcccaggctcaacggatacaacactgttacctgccagcaccaccacctcaggctccagtcaggaatcaacaacttcccacagcagctcaggttcaactgacacagcactgtcccctggcagtaccacagccttatcctttggtcaagaatctacaaccttccacagcagcccaggctccactcacacaacactcttccctgacagcaccacaagctcaggcatcgttgaagcatctacacgcgtccacagcagcactggctcaccacgcacaacactgtcccctgccagctccacaagccctggacttcagggagaatctaccgccttccagacccacccagcctcaactcacacgacgccttcacctcctagcaccgcaacagcccctgttgaagaatctacaacctaccaccgcagcccaggctcgactccaacaacacacttccctgccagctccacaacttcgggccacagtgagaaatcaacaatattccacagcagcccagatgcaagtggaacaacaccctcatctgcccactccacaacctcaggtcgtggagaatctacaacctcacgcatcagtccaggctcaactgaaataacaacgttacctggcagtaccacaacaccaggcctcagtgaggcatctaccaccttctacagcagccccagatcaccaaccacaacactctcacctgccagtatgacaagcctaggcgtcggtgaagaatccaccacctcccgtagccaaccaggttctactcactcaacagtgtcacctgccagcaccaccacgccaggcctcagtgaggaatctaccaccgtctacagcagcagcccaggctcaactgaaaccacagtgttccctcgcagcaccacaacctcagttcgtcgtgaagagcctacaaccttccacagccggccagcctcaactcacacaacactgttcactgaggacagcaccacctcgggcctcactgaagaatctacagccttccccggcagcccagcctccacccaaacagggttacctgccacactcacaaccgcagacctcggtgaggaatcaactacctttcccagcagctcaggctcaactggaacaaaactctcacctgcccgctccaccacctctggcctcgttggagaatccacaccctcacgcctcagtccaagctcaaccgaaacaacaactttacccggcagtcccacaacaccaagcctcagtgagaaatcaaccaccttctacactagccccagatcaccagatgcaacactctcacctgcaaccacaacaagctcaggcgtcagcgaagaatccagcacatcccacagtcaaccaggctcaacgcacacaacagcgttccctgacagcaccaccacctcaggcctcagtcaggaacctacaacttcccacagcagccaaggctcaacagaggcaacactgtcccctggcagtaccacagcctcatcccttggtcaacaatctacaaccttccacagcagcccaggcgacactgaaaccacactcttacctgacgacaccataacctcaggcctcgtggaggcatctacacccacccacagcagcactggctcgctacacacaacactgacccctgccagctccacaagcactggccttcaggaagaatctaccactttccagagctggccaagctcaagtgacacaacaccttcacctcccagcaccacagcagtccctgttgaacagcactggatcgccacacacaacactgtcccctgccggctctacaacccgtcagggagaatctaccaccttccagagctggccaaactcgaaggacactacccctgcacctcctactaccacatcagcctttgttga

SEQ ID NO: 150 - DNA, 1413 bp, Homo sapiens
  mRNA (1)..(1413): gi|75709191|ref|NM_014173.2| Homo sapiens HSPC142 protein (HSPC142), transcript variant 2
ggaggcgtcggggctgcgccgtacaacttccggctgtaaagatggcggcttcctagtgagtcggcggctgatttagaaggaggttcaggctacggtgagccgaagccacacaggagccatggaagtggcagagcccagcagccccactgaagaggaggaggaggaagaggagcactcggcagagcctcggccccgcactcgctccaatcctgaaggggctgaggaccgggcagtaggggcacaggccagcgtgggcagccgcagcgagggtgagggtgaggccgccagtgctgatgatgggagcctcaacacttcaggagccggccctaagtcctggcaggtgcccccgccagcccctgaggtccaaattcggacaccaagggtcaactgtccagagaaagtgattatctgcctggacctgtcagaggaaatgtcactgccaaagctggagtcgttcaacggctccaaaaccaacgccctcaatgtctcccagaagatgattgagatgttcgtgcggacaaaacacaagatcgacaaaagccacgagtttgcactggtggtggtgaacgatgacacggcctggctgtctggcctgacctccgacccccgcgagctctgtagctgcctctatgatctggagacggcctcctgttccaccttcaatctggaaggacttttcagcctcatccagcagaaaactgagcttccggtcacagagaacgtgcagacgattcccccgccatatgtggtccgcaccatccttgtctacagccgtccaccttgccagccccagttctccttgacggagcccatgaagaaaatgttccagtgcccatatttcttctttgacgttgtttacatccacaatggcactgaggagaaggaggaggagatgagttggaaggatatgtttgccttcatgggcagcctggataccaagggtaccagctacaagtatgaggtggcactggctgggccagccctggagttgcacaactgcatggcgaaactgttggcccaccccctgcagcggccttgccagagccatgcttcctacagcctgctggaggaggaggatgaagccattgaggttgaggccactgtctgaaccatccctgtacatctgcaccttcttgtgcaaggaagtccttggcctaaagccttggttctcaaactgggttccttgggacctccggggtgggggggttccaggaggcacgtagggtaccttgcagggtcctaggagggaaacccaggattccaggagggatcccaggaactgtgggcacccattttctgtgtctcccagcccatttccactcctagtttgtcatggataatttttgttcttccctgtgtgatttttgccatcaaaataaaaatttgagactcgttaaccgaagtccacgccaa

SEQ ID NO: 151 - DNA, 2248 bp, Homo sapiens
  mRNA (1)..(2248): gi|53759119|ref|NM_144596.2| Homo sapiens tetratricopeptide repeat domain 8 (TTC8), transcript variant 1
gacgccgccagctcttcactccacgcccacctctctcctggagcgctgggccttcgctggccgcaccggcagccatgagctcggagatggagccgctgctcctggcctggagctattttaggcgcaggaagttccagctctgcgccgatctatgcacgcagatgctggagaagtccccttatgaccaggaaccagatcctgaattgccagtgcatcaggcagcttggatcttaaaagcaagagcgctaacagaaatggtatacatagatgaaattgatgtagatcaggaaggaattgcagaaatgatgctggatgaaaatgctatagctcaagttccacgccctggaacgtctttgaaactccctggaactaatcagacaggagggcctagccaggccgttaggccaatcacacaagctggaagacccattacaggtttcctcaggcccagcacgcagagtggaaggccaggcactatggaacaggctatcagaacacccagaaccgcctacacagcccgccctatcaccagctcctccggaagatttgtcaggctgggaacggcttccatgcttacaagtcctgatggaccatttataaatttatctaggctgaatttaacaaagtattcccagaaacctaagttggcaaaggctttgtttgagtatatctttcatcatgaaaatgatgttaagactgctttggatctggctgccctctccacagaacattctcagtacaaggactggtggtggaaagtacagattggaaaatgttactacaggttgggaatgtatcgtgaagcagaaaaacagtttaaatcagccctgaagcagcaggaaatggtagatacatttctgtacttggcaaaagtttatgtctcattggatcaacctgtgactgctttaaatcttttcaaacaaggcttagataagtttccaggagaagtaaccctgctctgtggaattgcaagaatctatgaggaaatgaacaatatgtcatcagcagcagaatattacaaagaagttttgaaacaagacaatactcatgtggaagccatcgcatgcattggaagcaaccacttctattctgatcagccagaaatagctctccggttttacaggcggctgctgcagatgggcatttataacggccagctttttaacaatctggggctgtgttgcttctatgcccagcagtatgatatgactctgacctcatttgaacgtgccctttctttggctgaaaatgaagaagaggcagctgatgtctggtacaacttgggacatgtagctgtgggaataggagatacaaatttggcccatcagtgcttcaggctggctctggtcaacaacaacaaccacgccgaggcctacaacaacctggctgtgctggagatgcggaagggccacgttgaacaggcaagggcactattacaaactgcatcatcattagcaccccatatgtatgaaccgcattttaattttgcaacaatctctgataagattggagatctgcagagaagctatgttgctgcgcagaagtctgaagcagcatttccagaccatgtggacacacaacatttaattaaacaattaaggcagcattttgctatgctctgattgttccttagaccacatatgttcttatgaagcagcattatgcaaggggaaaaaagcactatgtctgtgtatgtatgtatatagtgtaatacgtatattttaacaaacctgtccttgatattagttaaggtgacacataagggtgacacagaatgtgtaatgcaaatttcatagtaatagtaactttataaaataatattataaaatacaggatttaaacctttctaaatagatcctgaaactgtctctcacattatatagtagatgtttgtttataatgtttacaaaacattttggtgaatttcctcaatgttttataaatgtacattttttaagtccttaagctgactcttagccatcatgtagcttaaggagtctgaaatctgccattaaaactgcacctttaagccaggtgtggtagcatgtgcctatagtcccagctacttgggaggtggaggtgggaggattataaatagagactttccttaagactttaaaaatgtatttaaaactattttttattaaatactttgtgatttcctattaagctttaaaataaatcattgtgtaaaacaccatcaaaaaaaaaaaaaaaaaaaaaaaaaaaaaaaaaaaaaaaaaaaaaa

SEQ ID NO: 152 - DNA, 7402 bp, Homo sapiens
  mRNA (1)..(7402): gi|21040319|ref|NM_138925.1| Homo sapiens SON DNA binding protein (SON), transcript variant a
ggagcctggaggactagcgaggaggagttgagagaacggagcggacgccatggcgaccaacatcgagcagatttttaggtctttcgtggtcagtaaattccgggaaattcaacaggagctttccagtggaaggaatgaaggccagctgaatggtgaaacaaatacacccattgaaggaaaccaggcgggtgatgcagctgcctctgccaggagtctaccaaatgaagaaatagtgcagaagatagaggaagtactttctggggtcttagatacagaactacgatataagccagacttgaaagagggctccagaaaaagtagatgcgtatctgtacaaacagatcctactgatgaaattcccactaaaaagtcaaagaagcataaaaagcacaaaaacaaaaagaagaaaaagaagaaagaaaaggaaaaaaaatataaaagacagccagaagaatctgagtcaaagacgaaatctcatgatgatgggaacatagatttagaatctgattcctttttaaagtttgattctgaaccttcagctgtggcgctggagcttcctacaagagcatttggcccatctgagaccaatgaatcccctgcagttgtgctagaacctcctgtagtatcaatggaggtatcagagccacacatcttagaaactctgaagccagctacaaaaactgcagaactgtcagttgtatctacatcagtaatctcagagcagtcagagcagtctgtggcagtaatgccagaaccatccatgacaaagattctggattcctttgcagcagcaccagtgcctactacaacactggtgttgaagtcatctgagccagttgtaacaatgtcagtggagtatcagatgaagtctgtgctgaaatctgtggagagcacatctccagagccatcaaagatcatgttggtagagcccccagtagcaaaagtgttagagccttcagaaacccttgtggtatcatcagagacacctactgaggtgtaccctgagccaagcacatcaacaacaatggattttccagagtcatctgcaattgaagcgctaagattgccagagcagcctgtagacgtaccatcggagattgcagattcatccatgacaagaccgcaggagttgccggagctgcctaagaccacagcgttggagctgcaggagtcgtcggtggcctcagcgatggagttgccggggccacctgcgacctccatgccggagttgcaggggccccctgtgactccagtgctggagttacctgggccctctgctaccccggtgccagagttgccagggcccctttctaccccagtgcctgagttgccagggccccctgcgacagcagtgcctgagttgccagggccctctgtgacaccagtgccacagttgtcgcaggaattgccagggcttccagcaccatccatggggttggagccaccacaggaggtaccagagccacctgtgatggcacaggagttgccagggctgcctttggtgacagcagcagtagagttgccagagcagcctgcggtaacagtagcaatggagttgaccgaacaacctgtgacgacgacagagttggagcagcctgtggggatgacaacggtggaacatcctgggcatcctgaggtgacaacggcaacagggttgctggggcagcctgaggcaacgatggtgctggagttgccaggacagccagtggcaacgacagcgctggagttgccggggcagccttcggtgactggggtgccagagttgccagggctgccttcggcaactagggcactggagttgtcggggcagcctgtggcaactggggcactagagttgcctgggccgctcatggcagctggggcactggagttctcggggcagtctggggcagctggagcactggagcttttggggcagcctctggcaacaggggtgctggagttgccagggcagcctggggcgccagagttgcctgggcagcctgtggcaactgtggcgctggagatctctgttcagtctgtggtgacaacatcggagctgtcaacgatgaccgtgtcgcagtccctggaggtgccctcgacgacagcgctggaatcctataatacggaacgttccatgatgtcatcttacgaacgctctatgatgtcttatgagcggtctatgatgtcccctatggctgaacgctctatgatgtcagcctacgagcgctctatgatgtcagcctacgagcgctctatgatgtcccctatggctgagcgctctatgatgtcagcttatgaacgctccatgatgtcagcttatgaacgctccatgatgtccccaatggctgatcgatctatgatgtccatgggtgctgaccggtctatgatgtcgtcatactctgctgctgaccggtctatgatgtcatcgtactctgcagctgaccgatctatgatgtcatcttatactgctgatcgttcaatgatgtctatggctgctgattcttacaccgattcttacactgacacatatacagaggcatatatggtgccacctttgcctcctgaagagcccccaacaatgccaccgttgccacctgaggagccaccaatgacaccaccattgcctcctgaggaaccaccagagggtccagcattgcccactgagcagtcagcattaacagctgaaaatacttggcctacagaggtgccatcatcaccatctgaagagtctgtatcgcagcctgagcctcctgtgagtcaaagtgagatttcggagccttcagcagtgcctactgattattcagtgtcagcatcagatccctcagttttagtatcagaggctgctgtgactgttccagaaccaccaccagagccagaatcttcaattacgttaacacctgtagagtctgcagtagtagcagaagaacatgaagttgttccagagagaccagtgacttgtatggtatctgaaactcccgccatgtcagctgaaccaactgtgttagcatcagagcctcctgttatgtcagagacagcagaaacatttgattccatgagagcctcaggacatgttgcctcagaagtatctacatccttgttggttccagcagtaactactccagtgctggcagagagcattctggagccgccagccatggctgccccagagtcttcagctatggctgtcctggagtcttcggctgtgaccgtcctggagtcttcgactgtgactgtcctggagtcttcgactgtaactgtcctggagccttcggttgtgactgtcccggagcctcctgttgtggctgagccagactatgttaccattcctgtgccagttgtttctgcgctggagccttctgtgcctgttctggaaccagcggtgtcagtccttcaaccttctatgattgtttcagaaccatctgtttctgtccaggaatcgactgtgacagtttcagagcctgctgtcacagtctcagagcagactcaagtaataccaactgaggtggctatagagtccacaccaatgatactggaatctagtatcatgtcatcacatgttatgaaaggaattaatctatcctctggtgatcaaaatcttgctccagagattggcatgcaggagattgcattgcattcaggtgaagaaccacatgctgaggaacacctgaaaggtgacttttacgaaagtgaacatggtataaatatagaccttaatataaataatcatttaattgctaaagagatggaacataatacagtgtgtgctgctggtactagtcctgttggggaaattggtgaagagaaaattttgcccaccagtgagactaaacagcgcacagtattggatacctaccctggtgttagtgaagctgatgcaggagaaactctatcttctactggtccttttgctctggaacctgatgcaacaggaactagtaagggtattgaatttaccacagcatctactctcagtttagttaataaatatgatgttgatttatctttaactactcaagatactgaacatgacatggtaatttccaccagtcctagtggtggtagtgaagctgacattgaagggcctttgcctgctaaagatattcatcttgatttaccatctaataataaccttgttagtaaggatacagaagaaccattacctgtaaaagagagtgaccagacattagcagctctgctcagccctaaagaaagtagtggaggagaaaaagaagtacctccccctcctaaagagacactgcctgattcaggattttctgccaatattgaggatattaatgaagcagatttagtgagaccgttacttcctaaggacatggaacgtcttacaagccttagagctggcattgaaggacctttacttgcaagtgatgttggacgtgacagatctgctgccagcccggttgtaagtagtatgccagaaagagcttcagagtcttcttcagaggaaaaagatgattatgaaatttttgtaaaagttaaggacactcacgaaaaaagcaagaaaaataagaaccgtgataagggggagaaagagaagaaaagagactcttcattaagatctcgaagtaagcgttccaaatcttctgaacacaaatcacgcaagcgtaccagtgaatctcgttctagggcaagaaagagatcatctaagtccaagtctcatcgctctcagacacgttcacggtcacgttcaagacgcaggaggagaagcagcagatcaagatcaaagtctagaggaagaagatctgtatcaaaagagaagcgcaaaagatctccaaagcacagatccaagtctagggaaagaaaaagaaaaagatcaagctccagggataaccgaaagacagttagagctcgaagtcgaaccccaagtcgtcggagtcggagtcatactccaagtcgtcgacgaaggtctagatctgtgggtagaagaaggagctttagcatttccccaagccgccgcagccgcacccccagccgccgcagccgcacccccagccgccgcagccgcacccccagccgccgcagccgcacccccagccgccggagccgcacccctagccgtcggagccgcaccccaagccgccggagaagatcaaggtctgtggtaagaagacgaagcttcagtatctcaccagtcagattaaggcgatcaagaacacccttaagaagaaggtttagcagatctcccatccgtcgtaaaagatccaggtcttctgaacgaggcagatcacccaaacgtctgacagatttggataaggctcaattacttgaaatagccaaagctaatgcagctgccatgtgtgctaaggctggtgtccctttaccaccaaacctaaagcctgcacctccacctactatagaagagaaagttgctaaaaagtcaggaggagctactatagaagaactaactgagaaatgtaaacagatcgcacagagtaaagaagatgatgatgtaatagtgaataaacctcatgtttcggatgaagaggaagaagaacctcctttttatcatcatccctttaaactcagtgaacccaaacctatttttttcaatctgaatattgctgcagcaaaaccaactccaccaaaaagccaggtaacattaacaaaagaattccctgtatcatctggatctcaacatcggaaaaaagaagcggatagtgtttatggagaatgggttcctgtggagaaaaatggtgaagaaaacaaagatgatgataatgttttcagcagcaatttgccctcagagcctgtggacatctctacagcaatgagtgaacgggcacttgctcagaaaagactcagtgagaatgcatttgatcttgaagccatgagcatgttaaatagagctcaggaaaggattgatgcctgggctcagctgaactctattcctggccagttcacaggaagtacaggagtacaggttttgacacaagaacagttggccaatactggtgcccaagcctggattaaaaaggatcagttcttaagagcagccccggtaactggaggaatgggagccgttttgatgagaaaaatgggctggagagaaggagaaggattaggaaaaaacaaagaaggcaataaggaacccatcctagttgattttaagacagaccgaaaaggtcttgttgcagtaggagaaagagcacaaaagaggtctgggaacttctctgctgcaatgaaagatctgtcaggcaaacatcctgtgtctgctttgatggagatctgtaataaaagaaggtggcaaccacctgaatttctattggtccatgatagtggccctgatcatcgcaaacattttctctttagggtattgataaatggaagcgcttaccagcccagctttgccagccctaataagaagcatgctaaagccacagcagctactgtggttcttcaagcaatgggccttgtaccaaaggacctcatggctaatgccacttgcttcaggagtgcctcacgtagatagattgaggttttataataatcatttcagaattttactctgcatcacaatgtatttcctctttaatgttgtaaatatttggcaatttaagacattgtgtaaaaagcaatctgtaaaaacatctccaggctttgatttttgtaccatggaaattgtatttaaccatacagggttttggtatgtttatattgtttaccttagtgatgtatttgtttaagtggctaacatccaaacgactgtttgaaggcatcagagtaatcttcagtgtggaatgttaaataacgcttttatactgtattttgtactatgatgtaactccccttccttatggctaggctactgtaacacttgcctgtaatcagtgaagggctgtgcaccttgtactatttcacaatgggttctgctggacagataatgggccagtgttattgaggtgatcaagatctgttccacagggctaatgccaccatctcccctcaaaattttgtagaggttctaaaaagaaagtggtatgttgtgtgatgatcagcactaagtcctgcattcctgttaaagccacttgggtcataagaagggagtaaaaaatgaagtctgactagaattctattgcagaggccagtacatttagtatggcattgagttgtgatatagttttactttgatgtgcattttgaatttcagctacacctagatagacgtaaaatgataattaaaatgctgtaaccaacttatctaataaaattggcaaccagccactattttgttgactatgagaaagttaaaagtttatgttaatttttagggtctgatagaatatttcatgtgtattacagtggtattcatatgctatgtctctaaactttattttcaaaagcttaaggcccaaatacaaacttctctggaataaacgtggtgttttattttctgggttat

SEQ ID NO: 153 - DNA, 650 bp, Homo sapiens
  mRNA (1)..(650): gi|31341340|ref|NM_174889.2| Homo sapiens Myc-induced mitochondria protein (mimitin)
agcgggtcccgctgctggcagcgctggaaactgggtggacggcatgggttggtctcaggatttgttccgcgccttgtggagatcgctgtcaagggaagtgaaggagcacgtgggcacggaccaattcgggaacaaatactactacatcccgcagtacaagaactggagaggacaaactattcgagagaaaagaattgtagaagcagcaaataaaaaagaagtagactatgaagcaggggatattccaacagaatgggaagcttggattagaagaacaagaaagactccacctactatggaggaaatactaaagaatgaaaaacacagagaagaaatcaaaataaaaagccaagatttttatgaaaaagaaaaactccttagtaaagagaccagtgaggaactcctgcctccaccagttcaaactcaaattaaaggccatgcctctgctccatactttggaaaggaagaaccctcagtggctcccagcagcactggtaaaacctttcagccaggatcctggatgccacgagatggcaagagccacaatcaatgaatgcattatggtcaaatcttttcatgtatatggatgtgactattttaacaaataaaagaagtgaaaagttaaaaaaaaaaagaaaaaaaaaaaaaaa

SEQ ID NO: 154 - DNA, 3322 bp, Homo sapiens
  mRNA (1)..(3322): gi|17388802|ref|NM_006452.2| Homo sapiens phosphoribosylaminoimidazole carboxylase, phosphoribosylaminoimidazole succinocarboxamide synthetase (PAICS)
gaaagctgtatttgctgcacgtggaaatctccgttattttccagcacccaacagtagcgtaatgggagtaacggacttaacctcatttctctttcagagcatttagccttcatatgcccttccctgcatgcttcccccaggccgtcaagacttgagttctgcctcgcttcccggcgcggtcgcagccctcagcccacttaggataatggcgacagctgaggtactgaacattggtaaaaaattatatgagggtaaaacaaaagaagtctacgaattgttagacagtccaggaaaagtcctcctgcagtccaaggaccagattacagcaggaaatgcagctagaaaaaaccacctggaaggaaaagctgcaatctcaaataaaatcaccagttgtatttttcagttattacaggaagcaggtattaaaactgccttcaccagaaaatgtggggagacagctttcattgcaccgcagtgtgaaatgattccaattgaatgggtttgcagaagaatagcaactggttcttttctcaaaagaaatcctggtgtcaaggaaggatataagttttacccacctaaagtggagttgtttttcaaggatgatgccaataatgacccacagtggtctgaggaacagctgattgctgcaaaattttgctttgctggacttcttataggccagactgaagtggatatcatgagtcatgctacacaggctatatttgaaatactggagaaatcctggttgccccagaattgtacactggttgatatgaagattgaatttggtgttgatgtaaccaccaaagaaattgttcttgctgatgttattgacaatgattcctggagactctggccatcaggagatcgaagccaacagaaagacaaacagtcttatcgggacctcaaagaagtaactcctgaagggctccaaatggtaaagaaaaactttgagtgggttgcagagagagtagagttgcttttgaaatcagaaagtcagtgcagggttgtagtgttgatgggctctacttctgatcttggtcactgtgaaaaaatcaagaaggcctgtggaaattttggcattccatgtgaacttcgagtaacatctgcgcataaaggaccagatgaaactctgaggattaaagctgagtatgaaggggatggcattcctactgtatttgtggcagtggcaggcagaagtaatggtttgggaccagtgatgtctgggaacactgcatatccagttatcagctgtcctcccctcacaccagactggggagttcaggatgtgtggtcttctcttcgactacccagtggtcttggctgttcaaccgtactttctccagaaggatcagctcaatttgctgctcagatatttgggttaagcaaccatttggtatggagcaaactgcgagcaagcattttgaacacatggatttccttgaagcaggctgacaagaaaatcagagaatgtaatttataagaaagaatgccattgaattttttaggggaaaaactacaaatttctaatttagctgaaggaaaatcaagcaagatgaaaaggtaattttaaattagagaacacaaataaaatgtattagtgaataaatgcttctctagatccatattaataaacatgagcatctaacccctcctttcttaggctagacaccaagatatttcagccagcctttatcattcctcttactttatcctttttccttaagtattggtggtcactactattgagtttcttccttaacactgattaaatgatcttaactccctcagctaaaactggcattactgactcccagctatatttctccagacttgcatttttttttttttttttgagacagggtctcactgtcgcccaggctggagtgcagtggcgtgatctcagttcactgctgctttccctcctgggctcaagcagttctcccacctcagcctctcgactaacagggactataatcttgcagcaccatgccgagctaattttattttttgtagagatgagctctcactatgtcacccaggttcgtctcaaactcctgaaccctagtaattctcctatctcagcctcccaaagtgctagggttacagacatgagccactgtgcctgtctagacttgtactttcaactgtccatttctccctgtctgtcccatgggcactcatgaaaaaacagaatgctcccaactttattcatcttccaagcctgtagctcttggtatactcactgttgcaagtcagaagcttgatttcatcattgatgtttttctcacgtttcacatctcactcatcaccaagtcatgttggtgttaatttctgattaacccttgaatttaccgtcttctcatcctctgtacaaaagcctcaagtgagggtcaaattcaacattatcctgatctagacagcccccattctcaatccacccttttccaagttgattgcccaaggacttctaacaataaactctcttttgcaccacagacttctttgaaaatatacatgctgttgaccctctctgtagaaaaccgcacacataaaacttaccaacagatttcattggttcttgggttctcccgaagcctatccatggtttatagattaagaattgatgaggtagctgggcacagtggctcacacctacgatcacagcacttcgggaggctgaagcaagcagatcacttgaggtcaggagtttgagaccagcctggccaacatggtgaaaccctgtctctactaaaaatacaaaaagtagccagccgtgatgacaggcacctgtaatcccagctactcgggaggctgaggcatgagaattgcttgaacccgggaggcggaggttgcagtgagcctggatcatgccactgcactccaacctgggcagcagagcaagactctgtctcaaaaggggaaaaaaaaaattgctgatgtgacccatgaagggaactcattttcctcgtaattttggactgccacacattggtacctttagttctctgaaggcccacgtttttatcattaagacctatttgttagctagtagagctttatgttcgctgtccatgaaaccttctgtaaccacagtgactacaagtagttctttctctattgaattattaggtccagaatagaagatgtcattgtacactttatttccctcacactgtgttatgctctgatgtgctatgcttagctatctgtcagagattagtaaattataaaactcatgtgtactacttaagtttatatcttatgctagtttataagaacaattaaaaggacttagaagattaaaaaaaaaaaaaaaaaa

SEQ ID NO: 155 - DNA, 2662 bp, Homo sapiens
  mRNA (1)..(2662): gi|14141149|ref|NM_004689.2| Homo sapiens metastasis associated 1 (MTA1)
cccggacatggccgccaacatgtacagggtcggagactacgtctactttgagaactcctccagcaacccatacctgatccggagaatcgaggagctcaacaagacggccaatgggaacgtggaggccaaagtggtgtgcttctaccggaggcgggacatctccagcaccctcatcgccctggccgacaagcacgcaaccctgtcagtctgctataaggccggaccgggggcggacaacggcgaggaaggggaaatagaagaggaaatggagaatccggaaatggtggacctgcccgagaaactaaagcaccagctgcggcatcgggagctgttcctctcccggcagctggagtctctgcccgccacgcacatcaggggcaagtgcagcgtcaccctgctcaacgagaccgagtcgctcaagtcctacctggagcgggaggatttcttcttctattctctagtctacgacccacagcagaagaccctgctggcagataaaggagagattcgagtaggaaaccggtaccaggcagacatcaccgacttgttaaaagaaggcgaggaggatggccgagaccagtccaggttggagacccaggtgtgggaggcgcacaacccactcacagacaagcagatcgaccagttcctggtggtggcccgctctgtgggcaccttcgcacgggccctggactgcagcagctccgtccgacagcccagcctgcacatgagcgccgcagctgcctcccgagacatcaccctgttccacgccatggatactctccacaagaacatctacgacatctccaaggccatctcggcgctggtgccgcagggcgggcccgtgctctgcagggacgagatggaggagtggtctgcatcagaggccaaccttttcgaggaagccctggaaaaatatgggaaggatttcacggacattcagcaagattttctcccgtggaagtcgctgaccagcatcattgagtactactacatgtggaagaccaccgacagatacgtgcagcagaaacgcttgaaagcagctgaagctgagagcaagttaaagcaagtttatattcccaactataacaagccaaatccgaaccaaatcagcgtcaacaacgtcaaggccggtgtggtgaacggcacgggggcgccgggccagagccctggggctggccgggcctgcgagagctgttacaccacacagtcttaccagtggtattcttggggtccccctaacatgcagtgtcgtctctgcgcatcttgttggacatattggaagaaatatggtggcttgaaaatgccaacccggttagatggagagaggccaggaccaaaccgcagtaacatgagtccccacggcctcccagcccggagcagcgggagccccaagtttgccatgaagaccaggcaggctttctatctgcacacgacgaagctgacgcggatcgcccggcgcctgtgccgtgagatcctgcgcccgtggcacgctgcgcggaacccctacctgcccatcaacagcgcggccatcaaggccgagtgcacggcgcggctgcccgaagcctcccagagcccgctggtgctgaagcaggcggtacgcaagccgctggaagccgtgcttcggtatcttgagacccacccccgcccccccaagcctgaccccgtgaaaagcgtgtccagcgtgctcagcagcctgacgcccgccaaggtggcccccgtcatcaacaacggctcccccaccatcctgggcaagcgcagctacgagcagcacaacggggtggacggcaacatgaagaagcgcctcttgatgcccagtaggggtctggcaaaccacggacagaccaggcacatgggaccaagccggaacctcctgctcaacgggaagtcctaccccaccaaagtgcgcctgatccgggggggctccctgcccccagtcaagcggcggcggatgaactggatcgacgccccgggtgacgtgttctacatgcccaaagaggagaccaggaagatccgcaagctgctctcatcctcggaaaccaagcgtgctgcccgccggccctacaagcccatcgccctgcgccagagccaggccctgccgccgcggccaccgccacctgcgcccgtcaacgacgagcccatcgtcatcgaggactaggggccgcccccacctgcggccgccccccgcccctcgcccgcccacacggccccttcccagccagcccgccgcccgcccctcagtttggtagtgccccacctcccgccctcacctgaagagaaacgcgctccttggcggacactgggggaggagaggaagaagcgcggctaacttattccgagaatgccgaggagttgtcgtttttagctttgtgtttactttttggctggagcggagatgaggggccaccccgtgcccctgtgctgcggggccttttgcccggaggccgggccctaaggttttgttgtgttctgttgaaggtgccattttaaattttatttttattactttttttgtagatgaacttgagctctgtaacttacacctggaatgttaggatcgtgcggccgcggccggccgagctgcctggcggggttggcccttgtcttttcaagtaattttcatattaaacaaaaacaaagaaaaaaaatcttataaaaaggaaaa

SEQ ID NO: 156 - DNA, 6644 bp, Homo sapiens
  mRNA (1)..(6644): gi|61102726|ref|NM_015315.3| Homo sapiens La ribonucleoprotein domain family, member 1 (LARP1)
gtgaccccaggccctggtcactccatgctttggagggtgcttttgtcaaagaggcctcctttccctcacccagagctggatttccaagaggctcccatacctagctgccctggcagactcccagggaggaaaaacagcgtggccttggcagctgccccgaggaaggagcccacaggtgacagggagaagccattgccattccctgtcctggcccccttcagcaaccctgaacactctgctccagccaaggtggtgagggcagctgttcctaaacagcgcaaaggcagcaaggttggtgactttggagatgcaatcaattggcccacacctggagagatagcccacaagagtgttcagccacagtcccacaagcctcagcctacccgtaaactgccacccaagaaggacatgaaggaacaggagaaaggagaagggagtgatagtaaggagagtccaaaaaccaaatcagatgaatcaggggaggaaaagaatggagatgaggattgccagcgaggcgggcagaagaagaaaggaaacaaacacaagtgggttccattacaaatagacatgaagcctgaagtgcccagagagaaactggcttcacgccccactcgcccaccggagcctagacacatacctgccaatcgcggagagatcaaagggtctgagtctgccacctacgtgcccgtggccccccccaccccagcctggcaaccagagatcaaaccggagcctgcctggcacgaccaggatgagacatcgagtgtgaagagtgatggggctggtggggcgcgggcttccttccgtggccgtggacgggggcgtggtcgcggccggggacgcggccggggtggcactcgaacccattttgactaccagtttggctaccgaaagtttgatggtgtggaggggcctcgtacgcccaagtacatgaacaacatcacctactactttgacaatgtcagcagcaccgagctttacagtgtggatcaggaactgctcaaagactacatcaagcgccagattgaatactacttcagcgtggacaatttagagcgagacttcttcctgcgaaggaaaatggatgctgatggtttcctacccatcacccttattgcttccttccaccgagtgcaggcccttaccactgacatttcactcatctttgcggccctaaaggacagcaaggtggtggagatcgttgatgagaaagttcgtaggagggaggaaccagaaaagtggcctcttcccccaatagtggattattcacagactgatttctcccagcttctcaactgccctgaatttgttccccgtcagcactaccaaaaggagacagagtcggcacctggctctcctcgtgcagtcaccccagtgccaaccaaaacagaggaggtcagcaacctaaagacactacccaagggcctgtctgccagcctgcctgacctggattctgagaactggattgaagtgaagaagaggcctcggccatccccagcacggcccaagaagtcagaggagtccagattttcccacctgacctctctgcctcagcagctgccttcccagcagctgatgtccaaggatcaggatgagcaagaggaactggattttctgtttgacgaggagatggagcagatggatgggcggaagaacaccttcactgcctggtctgatgaggaatctgactatgagattgatgacagggatgtcaacaagatcctcattgtcacccagacaccacattacatgcgccggcacccagggggggaccgcacaggcaaccacacctcgcgtgccaagatgagcgccgaactggccaaggtcattaatgatggcctcttctactatgagcaggacctgtgggctgaaaagtttgaacctgagtattcccagatcaagcaagaagtcgagaacttcaaaaaggtcaatatgatcagccgggagcagtttgacacactgacccctgagccccctgtggatcccaaccaggaagttcctcctgggccacctcggttccagcaagttcctacggatgccctggccaacaagttgtttggtgctcctgagccctccaccatcgcccgctctctaccaaccactgtcccagagtcaccaaactaccgcaacaccaggacccctcgcactccccggacaccacagctcaaagactcaagccagacatcacggttttacccagtggtgaaagaaggacggacactggatgccaagatgcctcgaaaaagaaagacaagacacagttcaaacccacccttggagagccatgtgggctgggtgatggattcccgtgagcacaggccccgtactgcttccatcagctccagcccctcagaagggacgcctacagttggcagctatggctgtacccctcagtcattgcccaagttccagcatccttcccatgaactgctcaaggaaaatggcttcacacaacacgtctaccataagtatcgtaggcgctgccttaatgagcggaaacgcttgggcattggccagtctcaggagatgaacacactcttccgcttctggtccttcttcctccgagatcacttcaacaaaaagatgtatgaggagttcaagcagctggctctggaggacgccaaagaaggctacagatatggtttggagtgcctttttcgatactacagttatggcctggaaaagaagttccggctggacatattcaaggattttcaggaggaaacggtgaaggactatgaagctggccaactgtatgggctggagaagttctgggccttcttgaaatattccaaagccaaaaatttggacattgaccccaaactgcaagaatacctcggcaaattccgacgtcttgaagacttccgagtagatccccccatgggtgaggagggcaaccacaagcgacactcagtggtagcaggaggtggcggcggtgagggcaggaagcggtgcccctcccagtcttccagcaggcctgctgccatgatcagccaaccccctacaccacccaccggccagcctgtccgggaagatgccaaatggacaagccagcactcgaacacacagactttgggaaagtgaaaagctccttagccctggggcttgaggggggaaaggggtagggtgggtaagagtccatgggggtgcccagtcccaggagaggggacaatgaagggacaggcctggagttactaggacaggcctttgtgctgagtagcaatgtatacaccatttgggctatcagaggtacccctgggcaggagcctctacatccccttccccctcctctctccatgactcttgacatcctagcttcttctaaggggggagggaaaggggggagatttttatatatatatacatatatatatatcaagttttaaattattgatagttcatctggattaccaaaatcactctgcagccctgcccgaggctagtaggctgcaaccctggtccccacccctaacctcctgctccccctcaagccaactatgcagcccacaagaaggccctgcgggcccccccattgcccagcactgtctcatagaaggctctggtggtacctctgggccccaggagcatcagccccttgatcatctggggtttgtcatcaccatattttctccctgctgttcccaccatgcccttctgccatcttctgggagaaggaaaccaaaggatctaaaactggggtttgggggaaggtttcagcctctccccactccccttgccccacaccctttactccccagcccagagagacgctgcttttaccaggaaagactattgaaagatgttttattttatttttctctgacctttccatccttgaaaaaatggggaaaaaagaagaaaaaagacaaaatcgaccataaaagaccaaaaaaaaaaaaaaaatcagaaaacccccacctaatccacagaaagtaatgtctttcccctccccttggaatttttgttttgtttttggaaataatatttttttaaaagttgccttattgtggagcgggaatctgaaatacccaaatgcctgttttcctcggtggagtcaacccgaagagctcccaccttctctggatgtgcctgggcttggactggctagaatctttctctggactgttgcatgtacagtgcctccatcctggaggcaagagagttgggagtggctcgaatcagagccgtgcccaagatatccctgctgttgcatcgtttgaagctgacgtcctgtgtctgtacactgctgccactgttgtgtcctcgctctgcttgctgttgcctcacgccaggccccgtcctgccgtgacacccttcatcctacccttggaaccccaaggccaagttggttcaaactgttggagaacagagttggcctgcatctggaacacacttgtcctcagcttaccatctcctcacaccccagagtggaaaggtgaacacctgcagctgaggcttggaaacgtttcttgtgttgccctgaaaaatctttgagacctcagggaggctctgtctctcttaaaaggtggagaaagatgccattctctccctaaggtctggtggagtctccccatcttgcatacccttctgcaagccatctatctctgctcactctccaattgacccgcctgggaacaagggatgaggaggagttgggggctggggggaatcctgccagttggtgaagccctgtggcaggaaggtatatgtggacatagagtatacctgattctctttcttcagccactgactgcttgggttgggctgtgaatgataatggaatggctggagtctgctgttgtcagaaggcagggagggtgatgaaggactgacccacatggactgggatgtgtgtcggttatgggcatgactgcacgttcactctcagtgggatctgggcaacatggagttcattgtcctgttgcttacttactgcaatgtctttggccctccttttcaactggttcctctgttgggcccaaaggttgggagtaggagacagtatcccaggctgacaagggcttgccctttaccttgggcaccttgttaatttttagcctgtgcccttccccacctttgccctcccagtggttggtatgtgggaagcccatctcagttcctgtgacttcatgtctcaaaccaaggatgagcgtctggtctctgctatgatggtggtatccgaggcctttccctgcccagtctggtgcctgccccacattgtaccggacactggattcctggacccccttctcctttcctttctttccttcaggtcacgcagccctgtactgtatccagcaccacagaaacctcagtgtttttcctctgctggtttggggcacaaggaagccttagggtatggggaaaggctgttattacctagagtttactcccaggccagggggctgccatcttcttcacagacatccctgaaaggaagcccctttggggcagggaggtgaggacttcatctcaacatcggctggtggttggtaggggagctttttcttttctttcctttttttttgtttttgtttttgtttttgtttttggtaacatgttaggagttaatgttgcaaagagtagtttacatcttcactttctgaagacacttgaatttaggaccgatgtatctgtgacaagcatgccagaagtggcaggggccatcagggctaaccacttcacacctaccatcgtcccatggggatccaagacctgagataaagcaacagcctgcccagatccctctgttcatcctatcccttccaaggttggtccatgccaacataacctctgggcatcagacatcagcaggtctgtgtgcctcagccctgttaaggggcaggtttctctttagccctcttcctgcacttgggagcaaaggcactaccagtagagaagggccatccagccgtgccccagcctggacccctggggctcagatagaggtgctgagcccctgtgtcaaagttgttaaatgtttttgttttgttccattgtagctctttttttttttttttcccctttcctggtgattgattttacaaaagaaagtaagctgcttagaaggccctggaagggaagtgaggaggagggacaaggaagatgactagttacggagggtgagggttgttttttgccaaaaagcctgggtagagtgatctgaattatctggcaccctcctgaatggaaccccagagtacctcctgtgtggaagggtccctggattttccctaacacccaccctctcccccttcagccatgctgatggcagagaagataagaacttggagcccatttctcactggagaggaaaacttgtcatctggctttgcggagaaggttccaccttacgctcgtagtacattatctttactatgtgctaggatatcatatttaaaaggacaaaaaaatgtaaaatacttgaatgagcttgtattataacattaatattattgagagtatctgctttccaggctgaagtgattcattcattattctagtcctgctttagtcctttgtaatttgtggtaattatgcttttctttttaatacaaaaaaatgtataaaaataaacacttgaaaaggcaaaaaaaaaaaaaaaaaaaaaaaaaaaaaaaaaaaaaaaaaaaaaaaaaaaaaaa

SEQ ID NO: 157 - DNA, 2415 bp, Homo sapiens
  mRNA (1)..(2415): gi|51492916|ref|XM_379904.2| PREDICTED: Homo sapiens mucin 12 (MUC12)
ccacagcagcacaacacacacaatatcttcagctcctagcaccacatctgcccttgttgaagaacctaccagctaccacagcagcccgggctcaactgcaacaacacacttccctgacagctccacaacctcaggccgtagtgaggaatcaacagcatcccacagcagccaagacgcaacgggaacaatagtcctacctgcccgctccacaacctcagttcttcttggagaatctacgacctcacccatcagttcaggctcaatggaaacgacagcgttacccggcagtaccacaacgccaggcctcagtgagaaatctaccactttccacatagctccagatcaccagaccaaacactctcacctgccagcatgacaagctccagcatcagtggagaacccaccagcttgtatagccaagcagagtcaacacacacaacagcgttccctgccagcaccaccacctcaggcctcagtcaggaatcaacaactttccacagtaagccaggctcaactgagacaacactgtcccctggcagcatcacaacttcatcttttgctcaagaatttaccacccctcatagccaaccaggctcagctctgtcaacagtgtcacctgccagcaccacagtgccaggccttagtgaggaatctaccaccttctacagcagcccaggctcaactgaaaccacagcgttttctcacagcaacacaatgtccattcatagtcaacaatctacacccttccctgacagcccaggcttcactcacacagtgttacctgccaccctcacaaccacagacattggtcaggaatcaacagccttccacagcagctcagacgcaactggaacaacacccttacctgcccgctccacagcctcagaccttgttggagaacctacaactttctacatcagcccatcccctacttacacaacactctttcctgcgagttccagcacatcaggcctcactgaggaatctaccaccttccacaccagtccaagcttcacttctacaattgtgtctactgaaagcctggaaaccttagcaccagggttgtgccaggaaggacaaatttggaatggaaaacaatgcgtctgtccccaaggctacgttggttaccagtgcttgtcccctctggaatccttccctgtagaaaccccggaaaaactcaacgccactttaggtatgacagtgaaagtgacttacagaaatttcacagaaaagatgaatgacgcatcctcccaggaataccagaacttcagtaccctcttcaagaatcggatggatgtcgttttgaagggcgacaatcttcctcagtatagaggggtgaacattcggagattgctcaacggtagcatcgtggtcaagaacgatgtcatcctggaggcagactacactttagagtatgaggaactgtttgaaaacctggcagagattgtaaaggccaagattatgaatgaaactagaacaactcttcttgatcctgattcctgcagaaaggccatactgtgctatagtgaagaggacactttcgtggattcatcggtgactccgggctttgacttccaggagcaatgcacccagaaggctgccgaaggatatacccagttctactatgtggatgtcttggatgggaagctggcctgtgtgaacaagtgcaccaaaggaacgaagtcgcaaatgaactgtaacctgggcacatgtcagctgcaacgcagtggcccccgctgcctgtgcccaaatacgaacacacactggtactggggagagacctgtgaattcaacatcgccaagagcctcgtgtatgggatcgtgggggctgtgatggcggtgctgctgctcgcattgatcatcctaatcatcttattcagcctatcccagagaaaacggcacagggaacagtatgatgtgcctcaagagtggcgaaaggaaggcacccctggcatcttccagaagacggccatctgggaagaccagaatctgagggagagcagattcggccttgagaacgcctacaacaacttccggcccaccctggagactgttgactctggcacagagctccacatccagaggccggagatggtagcatccactgtgtgagccaacgggggcctcccaccctcatctagctctgttcaggagagctgcaaacacagagcccaccacaagcctccggggcgggtcaagaggagaccgaagtcaggccctgaagccggtcctgctctgagctgacagacttggccagtcccctgcctgtgctcctgctggggaaggctgggggctgtaagcctctccatccgggagcttccagactcccagaagcctcggcacccctgtctcctcctgggtggctccccactctggaatttccctaccaataaaagcaaatctgaaagctcagaa

SEQ ID NO: 158 - DNA, 4225 bp, Homo sapiens
  mRNA (1)..(4225): gi|41281482|ref|NM_014753.2| Homo sapiens BMS1-like, ribosome assembly protein (yeast) (BMS1L)
ggagtcgcggctgcgagcaggttagagttacttgttattggtaaatagccactatggaggctaaggaccagaagaaacacagaaagaaaaacagtggacccaaagctgcaaagaaaaagaagcggcttctgcaggatctccagctaggagacgaagaagatgcccggaagagaaatcccaaagcttttgcagttcagtctgctgtgcggatggctcgatcctttcacaggactcaggatttgaagacaaaaaagcatcatattccagtggttgatcgaactccactagagcccccaccaatagtggtagtggtgatgggacctccaaaagttggaaagagcactttgatacaatgcctcattcggaactttacccggcagaagttgaccgagatcagaggccctgtgacgattgtgtcaggtaaaaagcgcagactcaccattattgaatgtgggtgtgacattaacatgatgattgatctggctaaagtagcagatctggtactgatgcttatagatgccagctttgggtttgaaatggaaacgtttgagtttctaaacatctgtcaagtacatggctttcctaaaattatgggagttctcacccacctcgactccttcaagcataataagcaactgaagaagacaaagaagcgattaaaacacaggttctggacggaagtttacccgggtgccaagctgttctacctttctggaatggtgcatggagaatatcaaaaccaagaaatccacaatctgggccgttttattacagttatgaagtttaggcctctcacatggcaaacttctcacccttatatcctggcagacaggatggaagatttgacaaacccagaggatatccgaacaaacatcaaatgtgaccggaaggtgtcactttatggttatttaagaggagcacacttgaaaaataaaagccaaattcacatgccaggggtaggagattttgccgtgagtgacatcagtttcctcccagacccttgcgctcttcctgaacaacaaaagaagcgctgtttaaatgagaaggagaagctggtttatgcgcctctttctggagttgggggtgtgctgtatgacaaagacgctgtctatgttgaccttggtggcagccacgtttttcaggatgaagtggggcccacccatgagctggtccagagtctcatctctacccactccaccattgatgccaagatggcttcaagtcgagtgacgctgttttctgattccaagccacttgggtcagaggatatagataatcaagggctaatgatgccaaaggaggaaaaacaaatggacttgaacactggtcgaatgcgtcggaaagccattttcggagatgaagatgaatctggagatagtgatgatgaagaagatgatgaaatgtctgaagatgacgggttggaaaacggctctagtgatgaggaagcagaagaggaggaaaatgctgagatgactgatcagtatatggctgttaagggcatcaaacgacggaaacttgagttggaagaagacagtgaaatggatttgccagcatttgctgacagtgacgatgaccttgagaggagctcagcggaagaaggggaagcggaggaagctgatgaaagcagtgaagaagaggactgcactgcaggagagaagggcatttcaggatcaaaggctgctggagaaggtagtaaagcagggctgtcaccagctaattgccagagtgaccgtgtgaatctggagaagtctttgctgatgaagaaagcagctctccccactttcgattctgggcattgcacagctgaagaggtgtttgcatctgaagatgaatctgaagaaagctcctcactcagtgcagaggaagaagactcagaaaatgaagaggctattagaaaaaagctttcaaagccttctcaagtgagcagtggtcagaaactggggccacagaacttcattgatgagaccagtgatatagaaaatttactcaaagaggaagaagattacaaggaagaaaataatgattccaaagaaacgtcaggtgccctcaagtggaaggaagacctttccagaaaggcagctgaggcctttctgaggcagcagcaagcagctccaaacctccgaaagcttatttatgggacagtgacagaagataatgaagaagaagatgatgatactctagaagagcttggagggttgtttcgtgtcaaccagcctgacagagagtgtaagcacaaggctgactctttggactgctccagatttcttgtggaggccccccatgactgggatttagaggaggttatgaacagtatcagagattgcttcgtgactggaaagtgggaagatgataaagatgcagccaaggtcttagcagaagatgaggagctctacggtgactttgaagacttggaaacaggggacgtgcacaagggaaaatcaggccccaatactcagaatgaagatatagagaaagaagttaaggaagaaattgaccctgacgaagaagaaagtgccaagaaaaagcatttggataagaagagaaaattgaaggagatgtttgatgcagaatatgatgaaggagaaagcacatattttgatgatcttaaaggagaaatgcagaaacaagcacagctgaatcgcgcagaatttgaagatcaagatgatgaagccagagttcagtatgagggttttcgacctgggatgtacgtccgcattgagattgaaaatgttccctgtgaatttgtgcagaactttgacccccattaccccattatcctgggtggcttgggcaacagtgagggaaatgttggctacgtgcagatgcgtctgaagaaacatcgctggtataagaaaatcctcaagtcccgagatccaatcatattttctgtagggtggaggaggtttcagaccatcccactgtattatatcgaagaccacaatggaagacaaaggcttctaaagtataccccacagcacatgcattgcggagcagccttttggggccctatcactccacagggaactggtttcttggcaatacagtctgtcagtggcataatgcctgattttcggatagctgctacaggagttgtccttgatctggataaatccataaaaattgtgaagaaattaaagctaactggttttccatataaaattttcaagaacacttcatttattaagggaatgtttaattctgccttggaagtggccaaatttgaaggtgctgtgattcgaacagtcagtgggataagggggcagatcaagaaagcactccgagctccagaaggagctttcagggccagctttgaggataagctgctgatgagcgatattgtcttcatgcgaacttggtatcctgtttccatcccagcgttctataacccagtaacatctttgttgaaaccagtgggtgagaaagacacctggtcaggaatgcggaccacgggccaactcaggctcgcccatggcatcagactaaaggcgaacaaggactctctgtataagccaatcctgaggcaaaagaaacattttaattcactgcacattccaaaagccttgcagaaggccctgccatttaagaacaagcccaagacccaagcaaaggcaggcaaggtgccaaaggacaggcggagaccggccgtcatacgcgagcctcatgaaagaaagatccttgcactgctggatgctctgagtacggtgcatagtcagaagatgaagaaggccaaggagcagcggcacctgcacaataaagagcacttcagagccaagcagaaggaggaggaggagaagctgaagcggcagaaggacctcaggaagaagctcttcagaattcaggggcagaaggaaagaagaaaccagaagtccagtttgaagggggctgagggccaattgcagtgagcctttggactggagggactgtccctggatctgcggaggtagacagtttcaaacatcacagtttgaatgcctgtgaatgacacgtcagtgggaaagagctcaagagatgtctctactcaaactgtgcctgcaggaggaggaacagagaagcctgggctgctgggactgggttcattctcatgacttggggctgtcgagatttaaagtgatgtaagctgtggttatgtggattctcttactttcctctgcctgcctcagtttaattattttgtcctacagaaatatcattaaaatatttttttgttaaaaaaaaaaaaaaaaaa

SEQ ID NO: 159 - DNA, 2218 bp, Homo sapiens
  mRNA (1)..(2218): gi|53759117|ref|NM_198309.2| Homo sapiens tetratricopeptide repeat domain 8 (TTC8), transcript variant 2
gacgccgccagctcttcactccacgcccacctctctcctggagcgctgggccttcgctggccgcaccggcagccatgagctcggagatggagccgctgctcctggcctggagctattttaggcgcaggaagttccagctctgcgccgatctatgcacgcagatgctggagaagtccccttatgaccaggcagcttggatcttaaaagcaagagcgctaacagaaatggtatacatagatgaaattgatgtagatcaggaaggaattgcagaaatgatgctggatgaaaatgctatagctcaagttccacgccctggaacgtctttgaaactccctggaactaatcagacaggagggcctagccaggccgttaggccaatcacacaagctggaagacccattacaggtttcctcaggcccagcacgcagagtggaaggccaggcactatggaacaggctatcagaacacccagaaccgcctacacagcccgccctatcaccagctcctccggaagatttgtcaggctgggaacggcttccatgcttacaagtcctgatggaccatttataaatttatctaggctgaatttaacaaagtattcccagaaacctaagttggcaaaggctttgtttgagtatatctttcatcatgaaaatgatgttaagactgctttggatctggctgccctctccacagaacattctcagtacaaggactggtggtggaaagtacagattggaaaatgttactacaggttgggaatgtatcgtgaagcagaaaaacagtttaaatcagccctgaagcagcaggaaatggtagatacatttctgtacttggcaaaagtttatgtctcattggatcaacctgtgactgctttaaatcttttcaaacaaggcttagataagtttccaggagaagtaaccctgctctgtggaattgcaagaatctatgaggaaatgaacaatatgtcatcagcagcagaatattacaaagaagttttgaaacaagacaatactcatgtggaagccatcgcatgcattggaagcaaccacttctattctgatcagccagaaatagctctccggttttacaggcggctgctgcagatgggcatttataacggccagctttttaacaatctggggctgtgttgcttctatgcccagcagtatgatatgactctgacctcatttgaacgtgccctttctttggctgaaaatgaagaagaggcagctgatgtctggtacaacttgggacatgtagctgtgggaataggagatacaaatttggcccatcagtgcttcaggctggctctggtcaacaacaacaaccacgccgaggcctacaacaacctggctgtgctggagatgcggaagggccacgttgaacaggcaagggcactattacaaactgcatcatcattagcaccccatatgtatgaaccgcattttaattttgcaacaatctctgataagattggagatctgcagagaagctatgttgctgcgcagaagtctgaagcagcatttccagaccatgtggacacacaacatttaattaaacaattaaggcagcattttgctatgctctgattgttccttagaccacatatgttcttatgaagcagcattatgcaaggggaaaaaagcactatgtctgtgtatgtatgtatatagtgtaatacgtatattttaacaaacctgtccttgatattagttaaggtgacacataagggtgacacagaatgtgtaatgcaaatttcatagtaatagtaactttataaaataatattataaaatacaggatttaaacctttctaaatagatcctgaaactgtctctcacattatatagtagatgtttgtttataatgtttacaaaacattttggtgaatttcctcaatgttttataaatgtacattttttaagtccttaagctgactcttagccatcatgtagcttaaggagtctgaaatctgccattaaaactgcacctttaagccaggtgtggtagcatgtgcctatagtcccagctacttgggaggtggaggtgggaggattataaatagagactttccttaagactttaaaaatgtatttaaaactattttttattaaatactttgtgatttcctattaagctttaaaataaatcattgtgtaaaacaccatcaaaaaaaaaaaaaaaaaaaaaaaaaaaaaaaaaaaaaaaaaaaaaa

SEQ ID NO: 160 - DNA, 1332 bp, Homo sapiens
  mRNA (1)..(1332): gi|78000204|ref|NM_002810.2| Homo sapiens proteasome (prosome, macropain) 26S subunit, non-ATPase, 4 (PSMD4), transcript variant 1
aattggaggagttgttgttaggccgtcccggagacccggtcgggagggaggaaggtggcaagatggtgttggaaagcactatggtgtgtgtggacaacagtgagtatatgcggaatggagacttcttacccaccaggctgcaggcccagcaggatgctgtcaacatagtttgtcattcaaagacccgcagcaaccctgagaacaacgtgggccttatcacactggctaatgactgtgaagtgctgaccacactcaccccagacactggccgtatcctgtccaagctacatactgtccaacccaagggcaagatcaccttctgcacgggcatccgcgtggcccatctggctctgaagcaccgacaaggcaagaatcacaagatgcgcatcattgcctttgtgggaagcccagtggaggacaatgagaaggatctggtgaaactggctaaacgcctcaagaaggagaaagtaaatgttgacattatcaattttggggaagaggaggtgaacacagaaaagctgacagcctttgtaaacacgttgaatggcaaagatggaaccggttctcatctggtgacagtgcctcctgggcccagtttggctgatgctctcatcagttctccgattttggctggtgaaggtggtgccatgctgggtcttggtgccagtgactttgaatttggagtagatcccagtgctgatcctgagctggccttggcccttcgtgtatctatggaagagcagcggcagcggcaggaggaggaggcccggcgggcagctgcagcttctgctgctgaggccgggattgctacgactgggactgaagactcagacgatgccctgctgaagatgaccatcagccagcaagagtttggccgcactgggcttcctgacctaagcagtatgactgaggaagagcagattgcttatgccatgcagatgtccctgcagggagcagagtttggccaggcggaatcagcagacattgatgccagctcagctatggacacatctgagccagccaaggaggaggatgattacgacgtgatgcaggaccccgagttccttcagagtgtcctagagaacctcccaggtgtggatcccaacaatgaagccattcgaaatgctatgggctccctggcctcccaggccaccaaggacggcaagaaggacaagaaggaggaagacaagaagtgagactggagggaaagggtagctgagtctgcttaggggactgcatgggaagcacggaatatagggttagatgtgtgttatctgtaaccattacagcctaaataaagcttggcaactttttttccttttttgcttcaaa

SEQ ID NO: 161 - DNA, 3143 bp, Homo sapiens
  mRNA (1)..(3143): gi|33356548|ref|NM_002388.3| Homo sapiens MCM3 minichromosome maintenance deficient 3 (S. cerevisiae) (MCM3)
ctcgaggtaacctttggtggcgggaagagttcggaagttttcgcgccggggtggagtcatcctgggaacctccacgcgactttggtggaggtagttctttggcagcgggcatggcgggtaccgtggtgctggacgatgtggagctgcgggaggctcagagagattacctggacttcctggacgacgaggaagaccagggaatttatcagagcaaagttcgggagctgatcagtgacaaccaataccggctgattgtcaatgtgaatgacctgcgcaggaaaaacgagaagagggctaaccggcttctgaacaatgcctttgaggagctggttgccttccagcgggccttaaaggattttgtggcctccattgatgctacctatgccaagcagtatgaggagttctacgtaggactggaaggcagctttggctccaagcacgtctccccgcggactcttacctcctgcttcctcagctgtgtggtctgtgtggagggcattgtcactaaatgttctctagttcgtcccaaagtcgtccgcagtgtccactactgtcctgctactaagaagaccatagagcgacgttattctgatctcaccaccctggtggcctttccctccagctctgtctatcctaccaaggatgaggagaacaatccccttgagacagaatatggcctttctgtctacaaggatcaccagaccatcaccatccaggagatgccggagaaggccccagccggccagctcccccgctctgtggacgtcattctggatgatgacttggtggataaagcgaagcctggtgaccgggttcaggtggtgggaacctaccgttgccttcctggaaagaagggaggctacacctctgggaccttcaggactgtcctgattgcctgtaatgttaagcagatgagcaaggatgctcagccctctttctctgctgaggatatagccaagatcaagaagttcagtaaaacccgatccaaggatatctttgaccagctggccaagtcattggccccaagtatccatgggcatgactatgtcaagaaagcaatcctctgcttgctcttgggaggggtggaacgagacctagaaaatggcagccacatccgtggggacatcaatattcttctaataggagacccatccgttgccaagtctcagcttctgcggtatgtgctttgcactgcaccccgagctatccccaccactggccggggctcctctggagtgggtctgacggctgctgtcaccacagaccaggaaacaggagagcgccgtctggaagcaggggccatggtcctggctgaccgaggcgtggtttgcattgatgaatttgacaaaatgtctgacatggatcgcacagccatccatgaagtgatggagcagggtcgagtgaccattgccaaggctggcatccatgctcggctgaatgcccgctgcagtgttttggcagctgccaaccctgtctacggcaggtatgaccagtataagactccaatggagaacattgggctacaggactcactgctgtcacgatttgacttgctcttcatcatgctggatcagatggatcctgagcaggatcgggagatctcagaccatgtccttcggatgcaccgttacagagcacctggggagcaggatggcgatgctatgcccttgggtagtgctgtggatatcctggccacagatgatcccaactttagccaggaagatcagcaggacacccagatttatgagaagcatgacaaccttctacatgggaccaagaagaaaaaggagaagatggtgagtgcagcattcatgaagaagtacatccatgtggccaaaatcatcaagcctgtcctgacacaggagtcggccacctacattgcagaagagtattcacgcctgcgcagccaggatagcatgagctcagacaccgccaggacatctccagttacagcccgaacactggaaactctgattcgactggccacagcccatgcgaaggcccgcatgagcaagactgtggacctgcaggatgcagaggaagctgtggagttggtccagtatgcttactttaagaaggttctggagaaggagaagaaacgtaagaagcgaagtgaggatgaatcagagacagaagatgaagaggagaaaagccaagaggaccaggagcagaagaggaagagaaggaagactcgccagccagatgccaaagatggggattcatacgacccctatgacttcagtgacacagaggaggaaatgcctcaagtacacactccaaagacggcagactcacaggagaccaaggaatcccagaaagtggagttgagtgaatccaggttgaaggcattcaaggtggccctcttggatgtgttccgggaagctcatgcgcagtcaatcggcatgaatcgcctcacagaatccatcaaccgggacagcgaagagcccttctcttcagttgagatccaggctgctctgagcaagatgcaggatgacaatcaggtcatggtgtctgagggcatcatcttcctcatctgaggaggcctcgtctctgaacttgggttgtgccgagagagtttgttctgtgtttcccaccctctccctgacccaagtctttgcctctactcccttaacagtgttgaattcaactgaaggcgaggaatgttggtgatgaagctgagttcaggactcggtggaccctttgggaatgggtcatgaaagctgccatggggtgaggaaagaggagacagtgggagaggacaatgactattgcatcttcattgcaaaagcactggctcatccgccctacttcccatcccacacaaacccaattgtaaataacatatgacttctgagtacttttgggggcacaactgttttctgtttgctgtttttttgttttgttttttttctccagagcactttggtctagactaggctttgggtggttccaattggtggagagaagctctgaggcacgtcatgcaggtcaagaaagctttctttgcagtagcaccagttaaggtgaatatgtattgtatcacaaaacaaacccaatatccagatgaatatccgagatgttgaataaacttagccatttcgtacacatggtaaaaaaaaaaaaaaaaaaaaaaaaaaaaaaaa

SEQ ID NO: 162 - DNA, 2760 bp, Homo sapiens
  mRNA (1)..(2760): gi|40353215|ref|NM_014938.2| Homo sapiens MLX interacting protein (MLXIP)
atggccgccgacgtcttcatgtgctccccgcgccggcctcgcagccggggccgccaggtgctgctcaagccccaggtgtccgaggacgacgacgactcggacacggatgagccgtccccgccgcccgcctccggcgcggccaccccggcccgggcccacgcgagcgccgcgccaccgccgcctcgggccgggccgggccgcgaggaacctccgcgccgccagcagatcatccacagcggccacttcatggtgtcgtcgccgcaccgagagcacccgcccaagaagggctacgatttcgacacggtcaacaaacagacgtgccagacctacagcttcggcaagactagctcctgccacctgtccatcgacgcctcgctcaccaagctcttcgagtgcatgactttggcctacagtgggaagttggtgtctccaaagtggaagaatttcaagggcctgaagctacagtggagagacaagatccggctcaataatgccatctggcgggcctggtacatgcagtatctggagaagcgcaagaatcctgtgtgccactttgtgacacccctggacggctctgtggacgtagacgagcaccgccggccggaggccatcaccacggaagggaagtactggaagagccgcatcgagattgtgatccgggagtatcacaagtggagaacctacttcaagaaaaggctacagcagcacaaggatgaggacctctccagcctggtccaggacgatgacatgctgtattggcacaagcacggggatggatggaagacccccgtccccatggaggaggatcccctgctggacacagacatgctcatgtcggaattcagcgacaccctcttctccacactttcttcacaccagccggtggcctggcccaatccccgggaaatagcacatctgggaaatgcagacatgatccagccgggactgattcctttgcagcctaacctggacttcatggacacctttgagcctttccaggacctcttctcttctagccgctccatttttggctccatgctacctgcatctgcctcagcacctgtaccagatcccaacaacccacctgcacaggagagcatcctgccgaccacagccctccccactgtgagccttcctgacagcctcatcgcgccccctaccgccccatccctggctcacatggatgggcagggctgtgaacacacctcccggactgaggacccgtttatccagcccacggacttcggtccctcagagccgccactgagtgtcccgcagcccttcctccctgtcttcaccatgcccctgctgtctcccagccccgccccaccgcccatctcccccgtgttaccattagttcctcctcctgccactgccctgaaccccccggctccacccaccttccatcagccacagaagtttgctggagtcaacaaagcgccgtctgtcatcacccacacggcctctgccaccctcacccacgatgcccccgccaccacctttagccagagtcagggccttgtgatcaccacccatcaccctgccccgtcagcggccccttgtgggctggcactgtctcctgtcacccggcctccccagccacggttaacttttgtgcaccccaaacctgtatccttgactgggggcaggcctaagcagccccacaaaatagtgcctgctcccaaaccagagcccgtgtccttggtgttgaagaatgcccgtatcgccccagctgccttttcaggccaaccacaagcggtgatcatgacgtcagggcctctgaagagagaagggatgttggcctccaccgtgtcccagtccaacgtggtcattgcgcctgctgccatcgccagggctcctggggtcccggagttccacagcagcatcctggtgacagatctcggccatggcacgagcagcccgcctgcccccgtctcccggctcttcccaagcacagcgcaagaccccctggggaagggcgagcaggtcccgctgcatgggggcagcccccaggtcactgtcacagggcccagtcgggactgcccaaactcagggcaggcctctccgtgtgcatcggagcagagccccagtcctcaatctccccagaacaactgctcagggaaatccgaccccaaaaatgtggctgcactaaagaaccggcagatgaagcacatctcagctgagcagaaaaggcgcttcaacatcaagatgtgcttcgacatgctcaacagcctcatctccaacaattccaagctgaccagtcacgccatcacactgcagaagaccgtggagtacatcaccaagctgcagcaggagagaggccagatgcaggaggaggcccggcggctgcgggaggagatcgaggagctcaatgccaccatcatctcctgccagcagctgctccctgccacgggagtccccgttacccggcgccagtttgatcacatgaaagacatgtttgacgaatacgtgaaaacccggaccttgcagaattggaagttctggattttcagcatcatcatcaagccgctgtttgagtcgttcaagggcatggtgtccaccagcagcctggaggagctgcaccggacggcgctctcctggctggaccagcactgctccctgcccatcctcaggccgatggtattgagcacgctgcggcagctgagcacctccacctccatcctcacagacccggcacagctgccagagcaggcgtccaaggctgtcaccaggattggcaagagattgggagagtcctag

SEQ ID NO: 163 - DNA, 4079 bp, Homo sapiens
  mRNA (1)..(4079): gi|11072092|ref|NM_018031.2| Homo sapiens WD repeat domain 6 (WDR6)
cttcttagccgtggctgcctcagcacctcgaggatcgacatggacgctctcgaggactacgtttggccgcgggcaacctcggagcttatactcctcccagtgacgggtctggagtgcgtgggggaccggctgttggcgggtgagggtcccgatgtcctggtgtacagcttggactttggtgggcatctgcggatgataaagcgagtgcagaacctgcttggccactatcttatccatggcttccgggtacggccagagcctaatggagaccttgacttggaggccatggtggctgtgtttggaagcaagggactccgagttgtgaaaattagctggggacagggccacttctgggagctttggcgctctggcctgtggaacatgtctgactggatttgggatgcacgctggcttgagggaaatatagccttggccctgggccacaactcagtggtgctatatgaccctgtagtagggtgcatcctgcaagaggtgccctgcacagacaggtgcaccctctcttcagcctgcctgattggagacgcctggaaggagctgaccatagtggcaggtgctgtttccaaccagctcttggtctggtacccagcaactgccttagcagacaacaaacctgtagcacctgaccgacgaatcagtgggcatgtgggcatcatcttcagcatgtcatacctggaaagcaagggattgctggctacagcttcagaagaccgaagcgttcgtatctggaaggtgggcgacctgcgagtgcctgggggtcgggtgcagaatattgggcactgctttgggcacagcgcccgtgtgtggcaggtcaagcttctagagaattaccttatcagtgcaggagaggattgtgtctgcttggtgtggagccatgaaggtgagatcctccaggcctttcggggacaccagggacgtgggatccgggccatagctgcccatgagaggcaggcctgggtgatcactgggggtgatgactcaggcattcggctgtggcacttggtagggcgtgggtaccggggattgggggtctcggctctctgcttcaagtcccgtagtaggccaggtacactcaaggctgtgactctggctggctcttggcgactgctggcagtgactgatacaggggccctgtatctctatgacgtcgaggtcaagtgctgggagcagctgctagaggataaacatttccagtcctactgcctgctggaggcagctcctggtcccgagggcttcggattgtgtgctatggccaatggggaaggtcgtgtcaaggttgtccccatcaacactccaactgctgctgtggaccagaccctgtttcctgggaaggtgcacagcttgagctgggccctgcgtggttatgaggagctcctgttgctggcatcgggccctggcggggtagtagcttgcctagagatctcagccgcaccctctggcaaggccatctttgtcaaggaacgttgtcggtacctgctgcccccaagcaagcagagatggcacacatgcagtgccttcctacccccaggtgacttcctggtgtgtggtgaccgccggggctctgtgctgctattcccctccagaccaggtctgctcaaggaccctggggtgggaggcaaggctcgggctggtgctggggcacctgtagtgggtagtggtagtagtgggggtgggaatgctttcactgggttgggcccagtgtctaccctgccctctctgcacgggaagcagggtgtgacctcagtcacatgccatggtggctatgtgtataccacagggcgtgatggagcctactaccagctgtttgtacgagacggccagctccagccagtcctaaggcagaagtcctgtcgaggcatgaactggctagctgggctccgtatagtgcccgatgggagcatggttatcctgggtttccatgccaatgagtttgtggtgtggaaccctcggtcacacgagaagctgcacatcgtcaactgtggtggagggcaccgttcgtgggcattctctgatactgaggcggccatggcctttgcttacctcaaggatggggatgtcatgctgtacagggctctgggtggctgcacccggccacacgtgattctccgggagggtctgcatggccgtgagatcacttgtgtaaagcgtgtgggcaccattaccctggggcctgaatatggagtgcccagcttcatgcagcctgatgacctggagcctggcagtgaggggcccgacttgactgacattgtgatcacatgtagtgaggacactactgtctgtgtcctagcactccctacaaccacaggctcagcccacgcactcacagctgtttgtaaccatatctcctcggtacgtgctgtggctgtgtggggcattggcaccccaggtggccctcaggatcctcagccaggcctgactgcccatgtggtgtctgcgggggggcgggctgagatgcactgcttcagcatcatggttactccggaccccagcaccccaagccgcctcgcctgccatgtcatgcacctttcgtcccaccggctagatgagtattgggaccggcaacgcaatcggcatcggatggttaaggtagacccagagaccaggtacatgtcccttgctgtgtgtgaacttgaccagcccggccttggcccccttgtggctgcagcctgtagtgatggggccgtaaggctctttcttttgcaggattctgggcggattctgcagctccttgctgaaaccttccaccataagcgatgtgtcctcaaggtccactcctttacacacgaggcacccaaccagaggcggaggctcctcctgtgcagcgcagctactgatggcagcctggctttctgggatctcaccaccatgctagaccatgactccactgtcctggagcctccagtggatcctgggcttccctaccggcttggcaccccctccctgactctccaggcccacagctgtggtatcaacagcctgcacaccttgcccacccgtgagggccaccatctcgtggccagtggcagtgaagatggatccctccatgtcttcgtgcttgctgtggagatgctacagctagaagaggctgtgggagaggctgggctggtaccccagctgcgtgtgctagaggaatactctgtcccctgtgcacatgctgcccatgtgacaggcctcaagatcctaagcccaagcatcatggtctcagcctccattgatcaacggctgaccttctggcgtctggggcatggtgaacccaccttcatgaatagcactgtgttccatgtgcctgatgtggctgacatggactgctggcctgtgagccctgagtttggccaccgttgtgcccttgggggtcaggggcttgaggtttacaactggtatgactgaggtatcctgcggtggctggcgtgctgggcatggggcctgctcacagacagcatggagcagggaagggctgtctgtgcccatgctcagcatgccttgaggggaggaggtggtggccgtgggttcctgatgtcggtgcaggagctgaaggtgagtggagtgctgccaagaatatgcccgactccccatgacaagacagaactttgtaacaaacagtaccaatttattttggccgtgggtttttgctttttttccagttgatgactttgtgaacattcccaggtattggagcctctgtggccttaaatgtggctcagtggagggagacccagcatagccaggccagtatggagcacctcacgcacagctctcagaagctgcaggcggacgaacatctgaccaaagaggtgtggtcgaggctcctgaaagagaaagggcctgctggtctcatcctctgcttcctttgcctttaccctatacctctctgcacgtcccaccccgttttgctgtgtgctcacccccaggatgtgtacccggttgtagtaggagctgaaatccatgctgagctgtaccaggaacttgcatatctagagacagagactgagtcactggcccatctctttgctcttgtgccccaggccagaataaagaatagagtgtagaggtcaaaaaaaaaa

SEQ ID NO: 164 - DNA, 2550 bp, Homo sapiens
  mRNA (1)..(2550): gi|12711669|ref|NM_023007.1| Homo sapiens jumonji domain containing 4 (JMJD4)
atgcgtgcaggcccggagccccaggcgctggtggggcagaaacgcggcgccctgcgtcttctggttccgaggctggtcctcaccgtttccgctccggcggaagtgaggaggagggtccttcgacccgtgctgagctggatggaccgcgagacgcgcgccctcgccgacagccacttccgaggcctgggggtcgatgtccccggcgtcggccaggctccgggccgggtagccttcgtctcggagccgggcgccttctcctacgccgactttgtgcggggcttcttgctgcccaacctgccctgcgtgttttccagcgccttcacgcagggctggggcagccggcggcgctgggtgacgcccgcggggaggcccgacttcgaccacctgctacggacctacggagacgtggttgtaccagttgcaaactgtggggtccaggaatacaactcgaaccccaaagagcacatgactctcagagactacatcacctactggaaagagtacatacaggcgggctactcctctcccaggggctgtctctacctcaaagactggcacttgtgcagggactttccggtggaggacgttttcaccctgcctgtgtacttctcgtccgactggctgaatgagttctgggatgcactggatgtggatgactaccgctttgtctacgcggggcctgcgggcagctggtccccgttccatgctgacatcttccgctccttcagctggtctgtcaatgtctgtgggaggaagaagtggctcctcttccccccagggcaggaagaggccctgcgggaccgccacggcaacctgccctacgacgtgacctccccagcactctgcgacacacacctgcacccacggaaccagcttgctggcccacccttggagatcacgcaggaagcgggcgagatggtgtttgtgcccagtggctggcaccaccaggtgcacaacctggatgacaccatctccatcaaccacaactgggtcaatggcttcaacctggccaacatgtggcgcttcttgcagcaggagctatgcgccgtgcaggaggaggtcagcgagtggagggactccatgcccgactggcaccaccactgccaggtcatcatgaggtcctgctcgggcatcaactttgaagagttttaccacttcctcaaggtcatcgctgagaagaggctcctggtcctgagggaggcagccgctgaggacggtgctgggttgggtttcgaacaggcagcctttgatgttgggcgcatcacagaggtgctggcctccttggttgcgcaccccgacttccagagagtggacaccagcgcgttctcaccacagcccaaagagctgctgcagcagctgagagaggctgttgatgctgctgcggccccatagcacctgtcgtgaggatagaaggacgggtggaagagaggcagcctcctgctccggggcccttccagaaataaagaccgccctccctgtgacctggggcccacccctgtcgaggcttgtggcctggctgttcatggccactgcctgggtgcctgttttcaggtgaggcccaatgaggtcagggacccaagatgggatgtggcccttctgacctgcagcaggcctgctgggagctcggagatggtgccaggacctggctcttttgggggccctgcctccttaggccaggacgcctgagctgacaggagtctgtgtctggtgtgccttctctggtggctcctcttaataggccagccctgtcccctcgtctcaggccattggaccacccctggctctgccctgtgggttcagggaggggttggagcagtgctgggcaagctcaccagggcctccaggcagggctggggttggcctccatcacctccaggtgatgggctgtggaaccagcggcctgcgccttcctctgggtacccagagtggagggctgggttgggctggcctttgccacctccctgcctttgcagggcctgtggacggctggagaggccacagatggggtggaatcccatctgctgctgaatcctcacctgggcctgagggactgtgcctgctgtgcactcacagctgggtcttcccaaggatgctgttctcaggagtggtgggtccccagcccctcttcacactgggtatgatggaggtgtgggcgggctcgtccaggccgatcaaggcacagcagtgagcagcggaggcctgtggtgggggatggactctcgtgggatcctcttgcagaggatgccccaggcctgaaccctctagtggatccacagtttgtggagactggcactctcccagccctgtccttgaccgagagtccagcattttttcagttggcccctggttggctgcctcaccccagcaggggaggaggcatccgaatccacagggacggcacgtgccatggctatgtacattgcctgcccgtggcatcaactggggccgctggcacttgtctaggatggaagcccccaagaagggccggggtttctgtctgctctgttcagtgaatcatgtgaagtgcttgcaaaggcagctttacacagt

SEQ ID NO: 165 - DNA, 1727 bp, Homo sapiens
  mRNA (1)..(1727): gi|58530864|ref|NM_002362.4| Homo sapiens melanoma antigen family A, 4 (MAGEA4), transcript variant 2
ggttagagagaagcgagctgctctgtctgaccagcagcttgggattggcggagggaagcgggccaggccctgtgaggagtcaaggttctgagcagacaggccaaccggaggacaggattccctggaggccacagaggagcaccaaggagaagatctgcctgtgggtccccattgcccagcttttgcctgcactcttgcctgctgccctgaccagagtcatcatgtcttctgagcagaagagtcagcactgcaagcctgaggaaggcgttgaggcccaagaagaggccctgggcctggtgggtgcacaggctcctactactgaggagcaggaggctgctgtctcctcctcctctcctctggtccctggcaccctggaggaagtgcctgctgctgagtcagcaggtcctccccagagtcctcagggagcctctgccttacccactaccatcagcttcacttgctggaggcaacccaatgagggttccagcagccaagaagaggaggggccaagcacctcgcctgacgcagagtccttgttccgagaagcactcagtaacaaggtggatgagttggctcattttctgctccgcaagtatcgagccaaggagctggtcacaaaggcagaaatgctggagagagtcatcaaaaattacaagcgctgctttcctgtgatcttcggcaaagcctccgagtccctgaagatgatctttggcattgacgtgaaggaagtggaccccgccagcaacacctacacccttgtcacctgcctgggcctttcctatgatggcctgctgggtaataatcagatctttcccaagacaggccttctgataatcgtcctgggcacaattgcaatggagggcgacagcgcctctgaggaggaaatctgggaggagctgggtgtgatgggggtgtatgatgggagggagcacactgtctatggggagcccaggaaactgctcacccaagattgggtgcaggaaaactacctggagtaccggcaggtacccggcagtaatcctgcgcgctatgagttcctgtggggtccaagggctctggctgaaaccagctatgtgaaagtcctggagcatgtggtcagggtcaatgcaagagttcgcattgcctacccatccctgcgtgaagcagctttgttagaggaggaagagggagtctgagcatgagttgcagccagggctgtggggaaggggcagggctgggccagtgcatctaacagccctgtgcagcagcttcccttgcctcgtgtaacatgaggcccattcttcactctgtttgaagaaaatagtcagtgttcttagtagtgggtttctattttgttggatgacttggagatttatctctgtttccttttacaattgttgaaatgttccttttaatggatggttgaattaacttcagcatccaagtttatgaatcgtagttaacgtatattgctgttaatatagtttaggagtaagagtcttgttttttattcagattgggaaatccgttctattttgtgaatttgggacataataacagcagtggagtaagtatttagaagtgtgaattcaccgtgaaataggtgagataaattaaaagatacttaattcccgccttatgcctcagtctattctgtaaaatttaaaaaatatatatgcatacctggatttccttggcttcgtgaatgtaagagaaattaaatctgaataaataattctttctgttaa

SEQ ID NO: 166 - DNA, 1591 bp, Homo sapiens
  mRNA (1)..(1591): gi|68051719|ref|NM_006088.5| Homo sapiens tubulin, beta 2C (TUBB2C)
atataagcgttggcggagcgtcggttgtagcactctgcgcgcccgctcttctgctgctgtttgtctacttcctcctgcttccccgccgccgccgccgccatcatgagggaaatcgtgcacttgcaggccgggcagtgcggcaaccaaatcggcgccaagttttgggaggtgatcagcgatgagcacggcatcgaccccacgggcacctaccacggggacagcgacctgcagctggaacgcatcaacgtgtactacaatgaggccaccggcggcaagtacgtgccccgcgccgtgctcgtggatctggagcccggcaccatggactccgtgcgctcggggcccttcgggcagatcttccggccggacaacttcgttttcggtcagagtggtgctgggaacaactgggccaaggggcactacacagaaggcgcggagctggtggactcggtgctggatgttgtgagaaaggaggctgagagctgtgactgcctgcagggtttccagctgacccactccctgggtggggggactgggtctgggatgggtaccctcctcatcagcaagatccgggaggagtacccagacaggatcatgaacacgtttagtgtggtgccttcgcccaaagtgtcagacacagtggtggagccctacaacgccaccctctcagtccaccagctcgtagaaaacacagacgagacctactgcattgataacgaagctctctacgacatttgcttcagaaccctaaagctgaccacgcccacctatggtgacctgaaccacctggtgtctgctaccatgagtggggtcaccacctgcctgcgcttcccaggccagctcaatgctgacctgcggaagctggctgtgaacatggtcccgtttccccggctgcacttcttcatgcccggctttgccccactgaccagccggggcagccagcagtaccgggcgctgaccgtgcccgagctcacccagcagatgtttgatgccaagaacatgatggctgcctgcgacccccgccatggccgctacctgacggttgccgccgtgttcaggggccgcatgtccatgaaggaggtggatgagcaaatgcttaatgtccaaaacaaaaacagcagctattttgttgagtggatccccaacaatgtgaaaacggctgtctgtgacatcccacctcgggggctaaaaatgtccgccaccttcattggcaacagcacggccatccaggagctgttcaagcgcatctccgagcagttcacggccatgttccggcgcaaggccttcctgcactggtacacgggcgagggcatggacgagatggagttcaccgaggccgagagcaacatgaatgacctggtgtccgagtaccagcagtaccaggatgccacagccgaggaggagggcgagttcgaggaggaggctgaggaggaggtggcctagagccttcagtcactggggaaagcagggaagcagtgtgaactctttattcactcccagcctgtcctgtggcctgtcccactgtgtgcacttgctgttttccctgtccacatccatgctgtacagacaccaccattaaagcattttcatagtg

SEQ ID NO: 167 - DNA, 2251 bp, Homo sapiens
  mRNA (1)..(2251): gi|17149846|ref|NM_002014.2| Homo sapiens FK506 binding protein 4, 59kDa (FKBP4)
gccgcgtgcagaggtgctcaagcctcctcgcggtccgcagtcagtgccgccgcgcccggcctcccgcacgccccgcaggtagcgcccccgcccgcggcccagagtgcgctcgcgccggcaccagctcccggataaacggcgcgccgcgcggagatgacagccgaggagatgaaggcgaccgagagcggggcgcagtcggcgccgctgcccatggagggagtggacatcagccccaaacaggacgaaggcgtgctgaaggtcatcaagagagagggcacaggtacagagatgcccatgattggggaccgagtctttgtccactacactggctggctattagatggcacaaagtttgactccagtctggatcgcaaggacaaattctcctttgacctgggaaaaggggaggtcatcaaggcttgggacattgccatagccaccatgaaggtgggggaggtgtgccacatcacctgcaaaccagaatatgcctacggttcagcaggcagtcctccaaagattccccccaatgccacgcttgtatttgaggtggagttgtttgagtttaagggagaagatctgacggaagaggaagatggcggaatcattcgcagaatacagactcgcggtgaaggctatgctaagcccaatgagggtgctatcgtggaggttgcactggaagggtactacaaggacaagctctttgaccagcgggagctccgctttgagattggcgagggggagaacctggatctgccttatggtctggagagggccattcagcgcatggagaaaggagaacattccatcgtgtacctcaagcccagctatgcttttggcagtgttgggaaggaaaagttccaaatcccaccaaatgctgagctgaaatatgaattacacctcaagagttttgaaaaggccaaggagtcttgggagatgaattcagaagagaagctggaacagagcaccatagtgaaagagcggggcactgtgtacttcaaggaaggtaaatacaagcaagctttactacagtataagaagatcgtgtcttggctggaatatgagtctagtttttccaatgaggaagcacagaaagcacaggcccttcgactggcctctcacctcaacctggccatgtgtcatctgaaactacaggccttctctgctgccattgaaagctgtaacaaggccctagaactggacagcaacaacgagaagggcctcttccgccggggagaggcccacctggccgtgaatgactttgaactggcacgggctgatttccagaaggtcctgcagctctaccccaacaacaaagccgccaagacccagctggctgtgtgccagcagcggatccgaaggcagcttgcccgggagaagaagctctatgccaatatgtttgagaggctggctgaggaggagaacaaggccaaggcagaggcttcctcaggagaccatcccactgacacagagatgaaggaggagcagaagagcaacacggcagggagccagtctcaggtggagacagaagcatagcccctctccaccagccctactcctgcggctgcctgccccccagtctccccactccaccctgttagttttgtaaaaactgaagaattttgagtgaattagacctttatttttctatctggttggatggtggctttaggggaagggggaaaggtgtaggctgggggattgaggtggggaatcattttagctggtgtcagcccctcttcccttcctccattgcacatgaacatatgtccatccatatatattcatcagaatgttaatttattttgctccctctgttaggtccattttctaagggtagaagaggcaagtggtagggatgaggtctgataagaacccagggtggagagggagactcctgggcagccgttttcctcatcctttccctctcccagtccatttccaaatgtggcctccatgtgggtgctagggacatgggaaaaaccactgctatgccatttcttctctctgttcccttcctcacccccgacggtgtggctgatgatgtcttctggtgtcatggtgaccaccccctgttccctgttctggtatttcccctgtcagtttcccctctcggccaggttgtgtcccaaaatcccctcagcctcttctctgcacgttgctgaaggtccaggcttgcctcaagttccatgcttgagcaataaagtggaaacaataaaacctgggtgtcagacaaaaaaaaaaaaaaaaaaaa

SEQ ID NO: 168 - DNA, 1124 bp, Homo sapiens
  mRNA (1)..(1124): gi|14790166|ref|NM_003823.2| Homo sapiens tumor necrosis factor receptor superfamily, member 6b, decoy (TNFRSF6B), transcript variant M68E
tccgcaggcggaccgggggcaaaggaggtggcatgtcggtcaggcacagcagggtcctgtgtccgcgctgagccgcgctctccctgctccagcaaggaccatgagggcgctggaggggccaggcctgtcgctgctgtgcctggtgttggcgctgcctgccctgctgccggtgccggctgtacgcggagtggcagaaacacccacctacccctggcgggacgcagagacaggggagcggctggtgtgcgcccagtgccccccaggcacctttgtgcagcggccgtgccgccgagacagccccacgacgtgtggcccgtgtccaccgcgccactacacgcagttctggaactacctggagcgctgccgctactgcaacgtcctctgcggggagcgtgaggaggaggcacgggcttgccacgccacccacaaccgtgcctgccgctgccgcaccggcttcttcgcgcacgctggtttctgcttggagcacgcatcgtgtccacctggtgccggcgtgattgccccgggcacccccagccagaacacgcagtgccagccgtgccccccaggcaccttctcagccagcagctccagctcagagcagtgccagccccaccgcaactgcacggccctgggcctggccctcaatgtgccaggctcttcctcccatgacaccctgtgcaccagctgcactggcttccccctcagcaccagggtaccaggagctgaggagtgtgagcgtgccgtcatcgactttgtggctttccaggacatctccatcaagaggctgcagcggctgctgcaggccctcgaggccccggagggctggggtccgacaccaagggcgggccgcgcggccttgcagctgaagctgcgtcggcggctcacggagctcctgggggcgcaggacggggcgctgctggtgcggctgctgcaggcgctgcgcgtggccaggatgcccgggctggagcggagcgtccgtgagcgcttcctccctgtgcactgatcctggccccctcttatttattctacatccttggcaccccacttgcactgaaagaggcttttttttaaatagaagaaatgaggtttcttaaagcttatttttataaagctttttcataaaa

SEQ ID NO: 169 - DNA, 1897 bp, Homo sapiens
  mRNA (1)..(1897): gi|29570786|ref|NM_030877.3| Homo sapiens catenin, beta like 1 (CTNNBL1)
actttacggcagtgtggctggagccgcggctgacgggcccgcggtctgggcgtgagtgcagggaagtggagtatttgctgggccgggtaccatggacgtgggcgaacttctgagctaccagcccaataggggcacaaaacgtccccgggatgatgaagaggaggagcagaagatgcgtcggaaacaaactggtactcgagaacgcggccgctatcgggaagaagaaatgactgtggtggaggaagcggatgatgacaaaaaaaggctgctgcagattattgacagagatggggaagaggaagaggaagaggaggagccattggatgaaagctcagtgaagaaaatgatcctcacatttgaaaagagatcatataaaaaccaagaattgcggattaagtttccagacaatccagagaagttcatggaatccgagctggacctaaatgacatcattcaggagatgcacgtggtggccaccatgccagacctgtaccaccttctggtggagctgaatgctgtacagtcgcttctcggcttgctcggacacgataatacagatgtgtccatagctgtggtcgatttgcttcaggaattaacagatatagacaccctccatgagagtgaagagggagcagaagtgctcatcgatgctctggtggatgggcaggtggtagcactgctggtacagaatctggagcgcctggatgagtctgtgaaagaggaggcagatggcgtccacaacactctggctattgtggaaaacatggctgagttccggcctgagatgtgtacagagggtgcccagcagggtcttctacagtggctgttgaagaggctgaaggcaaagatgccttttgatgccaacaaactgtattgcagtgaagtgctggccatattgctccaggacaatgatgaaaacagggaattgcttggggagctggatggaatcgatgtgcttcttcagcagttatccgtgtttaaaagacacaatcccagcacggctgaggagcaggagatgatggagaatctgtttgattccctctgctcctgtctaatgcttagttccaatcgtgagcgcttcctgaagggcgagggtcttcagctgatgaatctcatgctcagggaaaagaagatctcccggagcagtgccctgaaagtgctggaccatgccatgattggccccgaaggcacagacaactgccataagtttgttgacattcttggcttacgaaccatctttcccctctttatgaaatctcccaggaagatcaagaaagtgggaaccactgagaaggaacatgaagagcatgtctgttcgatcctggcttccctcctgcggaacctgagagggcagcagcggacccggcttctgaataaattcactgaaaatgacagtgagaaggttgacagactaatggagttgcattttaaatatctgggtgcaatgcaggtggcggacaagaagattgaaggggaaaaacacgacatggtccggcgaggagagatcatcgacaatgacaccgaggaggagttctacctccggcgcctggatgcggggctctttgttctccagcacatctgctacatcatggccgagatctgcaatgccaatgtcccccagattcgccagagggttcaccagatcctaaacatgcgaggaagctccatcaaaattgtcaggcatatcatcaaggagtatgcagagaacatcggggacggccggagcccggagttccgggagaacgagcaaaagcgcatcctgggcttgctggagaacttctagaggcaccttggccctgcgcatcatggactctctcagcttccctcccaggatcagtttctacacaactctgtgtggcttttggacaaattaaagctagttttggtaaaaaaaaaa

SEQ ID NO: 170 - DNA, 3063 bp, Homo sapiens
  mRNA (1)..(3063): gi|76443656|ref|NM_003752.3| Homo sapiens eukaryotic translation initiation factor 3, subunit 8, 110kDa (EIF3S8), transcript variant 1
cttctctctcggcgtttccgctgtcagggccctgcggtgtgactcgcgggctcagctggtccggccgtagcacctccgcgccgtcgccatgtcgcggtttttcaccaccggttcggacagcgagtccgagtcgtccttgtccggggaggagctcgtcaccaaacctgtcggaggcaactatggcaaacagccattgttgctgagcgaggatgaagaagataccaagagagttgtccgcagtgccaaggacaagaggtttgaggagctgaccaaccttatccggaccatccgtaatgccatgaagattcgtgatgtcaccaagtgcctggaagagtttgagctcctgggaaaagcatatgggaaggccaaaagcattgtggacaaagaaggtgtcccccggttctatatccgcatcctggctgacctagaggactatcttaatgagctttgggaagataaggaagggaagaagaagatgaacaagaacaatgccaaggctctgagcaccttgcgtcagaagatccgaaaatacaaccgtgatttcgagtcccatatcacaagctacaagcagaaccccgagcagtctgcggatgaagatgctgagaaaaatgaggaggattcagaaggctcttcagatgaggatgaggatgaggacggagtcagtgctgcaactttcttgaagaagaaatcagaagctccttctggggagagtcgcaagttcctcaaaaagatggatgatgaagatgaggactcagaagattccgaagatgatgaagactgggacacaggttccacatcttccgattccgactcagaggaggaagaagggaaacaaaccgcgctggcctcaagatttcttaaaaaggcacccaccacagatgaggacaagaaggcagccgagaagaaacgggaggacaaagctaagaagaagcacgacaggaaatccaagcgcctggatgaggaggaggaggacaatgaaggcggggagtgggaaagggtccggggcggagtgccgttggttaaggagaagccaaaaatgtttgccaagggaactgagatcacccatgctgttgttatcaagaaactgaatgagatcctacaggcacgaggcaagaagggaactgatcgtgctgcccagattgagctgctgcaactgctggttcagattgcagcggaaaacaacctgggagagggcgtcattgtcaagatcaagttcaatatcatcgcctctctctatgactacaaccccaacctggcaacctacatgaagccagagatgtgggggaagtgcctggactgcatcaatgagctgatggatatcctgtttgcaaatcccaacatttttgttggagagaatattctggaagagagtgagaacctgcacaacgctgaccagccactgcgtgtccgtggctgcatcctaactctggtggaacgaatggatgaagaatttaccaaaataatgcaaaatactgaccctcactcccaagagtacgtggagcacttgaaggatgaggcccaggtgtgtgccatcatcgagcgtgtgcagcgctacctggaggagaagggcactaccgaggaggtctgccgcatctacctgctgcgcatcctgcacacctactacaagtttgattacaaggcccatcagcgacagctgaccccgcctgagggctcctcaaagtctgagcaagaccaggcagaaaatgagggcgaggactcggctgtgttgatggagagactgtgcaagtacatctacgccaaggaccgcacagaccggatccgcacatgtgccatcctctgccacatctaccaccatgctctgcactcgcgctggtaccaggcccgcgacctcatgctcatgagccacttgcaggacaacattcagcatgcagacccgccagtgcagatcctttacaaccgcaccatggtgcagctgggcatctgtgccttccgccaaggcctgaccaaggacgcacacaacgccctgctggacatccagtcgagtggccgagccaaggagcttctgggccagggcctgctgctgcgcagcctgcaggagcgcaaccaggagcaggagaaggtggagcggcgccgtcaggtccccttccacctgcacatcaacctggagctgctggagtgtgtctacctggtgtctgccatgctcctggagatcccctacatggccgcccatgagagcgatgcccgccgacgcatgatcagcaagcagttccaccaccagctgcgcgtgggcgagcgacagcccctgctgggtccccctgagtccatgcgggaacatgtggtcgctgcctccaaggccatgaagatgggtgactggaagacctgtcacagttttatcatcaatgagaagatgaatgggaaagtgtgggaccttttccccgaggctgacaaagtccgcaccatgctggttaggaagatccaggaagagtcactgaggacctacctcttcacctacagcagtgtctatgactccatcagcatggagacgctgtcagacatgtttgagctggatctgcccactgtgcactccatcatcagcaaaatgatcattaatgaggagctgatggcctccctggaccagccaacacagacagtggtgatgcaccgcactgagcccactgcccagcagaacctggctctgcagctggccgagaagctgggcagcctggtggagaacaacgaacgggtgtttgaccacaagcagggcacctacgggggctacttccgagaccagaaggacggctaccgcaaaaacgagggctacatgcgccgcggtggctaccgccagcagcagtctcagacggcctactgagctctccactctgtttcccgcctgggccatccaaccttgaagtcctaaaccacacctcagtcactaaaggtctgtttaaagttgttctggttgattgcttgttgccacaaaggtgtgttgagcccattcatttgctgattatatttctgagctgctaccacatgacagacacaaggctcagatgaagaggtgaattgaacacgttcctgacctcaaaaaaaaaaaaaaaaaaa

SEQ ID NO: 171 - DNA, 8368 bp, Homo sapiens
  mRNA (1)..(8368): gi|4503744|ref|NM_001456.1| Homo sapiens filamin A, alpha (actin binding protein 280) (FLNA)
gcgatccgggcgccaccccgcggtcatcggtcaccggtcgctctcaggaacagcagcgcaacctctgctccctgcctcgcctcccgcgcgcctaggtgcctgcgactttaattaaagggccgtcccctcgccgaggctgcagcaccgcccccccggcttctcgcgcctcaaaatgagtagctcccactctcgggcgggccagagcgcagcaggcgcggctccgggcggcggcgtcgacacgcgggacgccgagatgccggccaccgagaaggacctggcggaggacgcgccgtggaagaagatccagcagaacactttcacgcgctggtgcaacgagcacctgaagtgcgtgagcaagcgcatcgccaacctgcagacggacctgagcgacgggctgcggcttatcgcgctgttggaggtgctcagccagaagaagatgcaccgcaagcacaaccagcggcccactttccgccaaatgcagcttgagaacgtgtcggtggcgctcgagttcctggaccgcgagagcatcaaactggtgtccatcgacagcaaggccatcgtggacgggaacctgaagctgatcctgggcctcatctggaccctgatcctgcactactccatctccatgcccatgtgggacgaggaggaggatgaggaggccaagaagcagacccccaagcagaggctcctgggctggatccagaacaagctgccgcagctgcccatcaccaacttcagccgggactggcagagcggccgggccctgggcgccctggtggacagctgtgccccgggcctgtgtcctgactgggactcttgggacgccagcaagcccgttaccaatgcgcgagaggccatgcagcaggcggatgactggctgggcatcccccaggtgatcacccccgaggagattgtggaccccaacgtggacgagcactctgtcatgacctacctgtcccagttccccaaggccaagctgaagccaggggctcccttgcgccccaaactgaacccgaagaaagcccgtgcctacgggccaggcatcgagcccacaggcaacatggtgaagaagcgggcagagttcactgtggagaccagaagtgctggccagggagaggtgctggtgtacgtggaggacccggccggacaccaggaggaggcaaaagtgaccgccaataacgacaagaaccgcaccttctccgtctggtacgtccccgaggtgacggggactcataaggttactgtgctctttgctggccagcacatcgccaagagccccttcgaggtgtacgtggataagtcacagggtgacgccagcaaagtgacagcccaaggtcccggcctggagcccagtggcaacatcgccaacaagaccacctactttgagatctttacggcaggagctggcacgggcgaggtcgaggttgtgatccaggaccccatgggacagaagggcacggtagagcctcagctggaggcccggggcgacagcacataccgctgcagctaccagcccaccatggagggcgtccacaccgtgcacgtcacgtttgccggcgtgcccatccctcgcagcccctacactgtcactgttggccaagcctgtaacccgagtgcctgccgggcggttggccggggcctccagcccaagggtgtgcgggtgaaggagacagctgacttcaaggtgtacacaaagggcgctggcagtggggagctgaaggtcaccgtgaagggccccaagggagaggagcgcgtgaagcagaaggacctgggggatggcgtgtatggcttcgagtattaccccatggtccctggaacctatatcgtcaccatcacgtggggtggtcagaacatcgggcgcagtcccttcgaagtgaaggtgggcaccgagtgtggcaatcagaaggtacgggcctggggccctgggctggagggcggcgtcgttggcaagtcagcagactttgtggtggaggctatcggggacgacgtgggcacgctgggcttctcggtggaagggccatcgcaggctaagatcgaatgtgacgacaagggcgacggctcctgtgatgtgcgctactggccgcaggaggctggcgagtatgccgttcacgtgctgtgcaacagcgaagacatccgcctcagccccttcatggctgacatccgtgacgcgccccaggacttccacccagacagggtgaaggcacgtgggcctggattggagaagacaggtgtggccgtcaacaagccagcagagttcacagtggatgccaagcacggtggcaaggccccacttcgggtccaagtccaggacaatgaaggctgccctgtggaggcgttggtcaaggacaacggcaatggcacttacagctgctcctacgtgcccaggaagccggtgaagcacacagccatggtgtcctggggaggcgtcagcatccccaacagccccttcagggtgaatgtgggagctggcagccaccccaacaaggtcaaagtatacggccccggagtagccaagacagggctcaaggcccacgagcccacctacttcactgtggactgcgccgaggctggccagggggacgtcagcatcggcatcaagtgtgcccctggagtggtaggccccgccgaagctgacatcgacttcgacatcatccgcaatgacaatgacaccttcacggtcaagtacacgccccggggggctggcagctacaccattatggtcctctttgctgaccaggccacgcccaccagccccatccgagtcaaggtggagccctctcatgacgccagtaaggtgaaggccgagggccctggcctcagtcgcactggtgtcgagcttggcaagcccacccacttcacagtaaatgccaaagctgctggcaaaggcaagctggacgtccagttctcaggactcaccaagggggatgcagtgcgagatgtggacatcatcgaccaccatgacaacacctacacagtcaagtacacgcctgtccagcagggtccagtaggcgtcaatgtcacttatggaggggatcccatccctaagagccctttctcagtggcagtatctccaagcctggacctcagcaagatcaaggtgtctggcctgggagagaaggtggacgttggcaaagaccaggagttcacagtcaaatcaaagggtgctggtggtcaaggcaaagtggcatccaagattgtgggcccctcgggtgcagcggtgccctgcaaggtggagccaggcctgggggctgacaacagtgtggtgcgcttcctgccccgtgaggaagggccctatgaggtggaggtgacctatgacggcgtgcccgtgcctggcagcccctttcctctggaagctgtggcccccaccaagcctagcaaggtgaaggcgtttgggccggggctgcagggaggcagtgcgggctcccccgcccgcttcaccatcgacaccaagggcgccggcacaggtggcctgggcctgacggtggagggcccctgtgaggcgcagctcgagtgcttggacaatggggatggcacatgttccgtgtcctacgtgcccaccgagcccggggactacaacatcaacatcctcttcgctgacacccacatccctggctccccattcaaggcccacgtggttccctgctttgacgcatccaaagtcaagtgctcaggccccgggctggagcgggccaccgctggggaggtgggccaattccaagtggactgctcgagcgcgggcagcgcggagctgaccattgagatctgctcggaggcggggcttccggccgaggtgtacatccaggaccacggtgatggcacgcacaccattacctacattcccctctgccccggggcctacaccgtcaccatcaagtacggcggccagcccgtgcccaacttccccagcaagctgcaggtggaacctgcggtggacacttccggtgtccagtgctatgggcctggtattgagggccagggtgtcttccgtgaggccaccactgagttcagtgtggacgcccgggctctgacacagaccggagggccgcacgtcaaggcccgtgtggccaacccctcaggcaacctgacggagacctacgttcaggaccgtggcgatggcatgtacaaagtggagtacacgccttacgaggagggactgcactccgtggacgtgacctatgacggcagtcccgtgcccagcagccccttccaggtgcccgtgaccgagggctgcgacccctcccgggtgcgtgtccacgggccaggcatccaaagtggcaccaccaacaagcccaacaagttcactgtggagaccaggggagctggcacgggcggcctgggcctggctgtagagggcccctccgaggccaagatgtcctgcatggataacaaggacggcagctgctcggtcgagtacatcccttatgaggctggcacctacagcctcaacgtcacctatggtggccatcaagtgccaggcagtcctttcaaggtccctgtgcatgatgtgacagatgcgtccaaggtcaagtgctctgggcccggcctgagcccaggcatggttcgtgccaacctccctcagtccttccaggtggacacaagcaaggctggtgtggccccattgcaggtcaaagtgcaagggcccaaaggcctggtggagccagtggacgtggtagacaacgctgatggcacccagaccgtcaattatgtgcccagccgagaagggccctacagcatctcagtactgtatggagatgaagaggtaccccggagccccttcaaggtcaaggtgctgcctactcatgatgccagcaaggtgaaggccagtggccccgggctcaacaccactggcgtgcctgccagcctgcccgtggagttcaccatcgatgcaaaggacgccggggagggcctgctggctgtccagatcacggatcccgaaggcaagccgaagaagacacacatccaagacaaccatgacggcacgtatacagtggcctacgtgccagacgtgacaggtcgctacaccatcctcatcaagtacggtggtgacgagatccccttctccccgtaccgcgtgcgtgccgtgcccaccggggacgccagcaagtgcactgtcacagtgtcaatcggaggtcacgggctaggtgctggcatcggccccaccattcagattggggaggagacggtgatcactgtggacactaaggcggcaggcaaaggcaaagtgacgtgcaccgtgtgcacgcctgatggctcagaggtggatgtggacgtggtggagaatgaggacggcactttcgacatcttctacacggccccccagccgggcaaatacgtcatctgtgtgcgctttggtggcgagcacgtgcccaacagccccttccaagtgacggctctggctggggaccagccctcggtgcagccccctctacggtctcagcagctggccccacagtacacctacgcccagggcggccagcagacttgggccccggagaggcccctggtgggtgtcaatgggctggatgtgaccagcctgaggccctttgaccttgtcatccccttcaccatcaagaagggcgagatcacaggggaggttcggatgccctcaggcaaggtggcgcagcccaccatcactgacaacaaagacggcaccgtgaccgtgcggtatgcacccagcgaggctggcctgcacgagatggacatccgctatgacaacatgcacatcccaggaagccccttgcagttctatgtggattacgtcaactgtggccatgtcactgcctatgggcctggcctcacccatggagtagtgaacaagcctgccaccttcaccgtcaacaccaaggatgcaggagaggggggcctgtctctggccattgagggcccgtccaaagcagaaatcagctgcactgacaaccaggatgggacatgcagcgtgtcctacctgcctgtgctgccgggggactacagcattctagtcaagtacaatgaacagcacgtcccaggcagccccttcactgctcgggtcacaggtgacgactccatgcgtatgtcccacctaaaggtcggctctgctgccgacatccccatcaacatctcagagacggatctcagcctgctgacggccactgtggtcccgccctcgggccgggaggagccctgtttgctgaagcggctgcgtaatggccacgtggggatttcattcgtgcccaaggagacgggggagcacctggtgcatgtgaagaaaaatggccagcacgtggccagcagccccatcccggtggtgatcagccagtcggaaattggggatgccagtcgtgttcgggtctctggtcagggccttcacgaaggccacacctttgagcctgcagagtttatcattgatacccgcgatgcaggctatggtgggctcagcctgtccattgagggccccagcaaggtggacatcaacacagaggacctggaggacgggacgtgcagggtcacctactgccccacagagccaggcaactacatcatcaacatcaagtttgccgaccagcacgtgcctggcagccccttctctgtgaaggtgacaggcgagggccgggtgaaagagagcatcacccgcaggcgtcgggctccttcagtggccaacgttggtagtcattgtgacctcagcctgaaaatccctgaaattagcatccaggatatgacagcccaggtgaccagcccatcgggcaagacccatgaggccgagatcgtggaaggggagaaccacacctactgcatccgctttgttcccgctgagatgggcacacacacagtcagcgtcaagtacaagggccagcacgtgcctgggagccccttccagttcaccgtggggcccctaggggaagggggagcccacaaggtccgagctgggggccctggcctggagagagctgaagctggagtgccagccgaattcagtatctggacccgggaagctggtgctggaggcctggccattgctgtcgagggccccagcaaggctgagatctcttttgaggaccgcaaggacggctcctgtggtgtggcttatgtggtccaggagccaggtgactacgaagtctcagtcaagttcaacgaggaacacattcccgacagccccttcgtggtgcctgtggcttctccgtctggcgacgcccgccgcctcactgtttctagccttcaggagtcagggctaaaggtcaaccagccagcctcttttgcagtcagcctgaacggggccaagggggcgatcgatgccaaggtgcacagcccctcaggagccctggaggagtgctatgtcacagaaattgaccaagataagtatgctgtgcgcttcatccctcgggagaatggcgtttacctgattgacgtcaagttcaacggtacccacatccctggaagccccttcaagatccgagttggggagcctgggcatggaggggacccaggcttggtgtctgcttacggagcaggtctggaaggcggtgtcacagggaacccagctgagttcgtcgtgaacacgagcaatgcgggagctggtgccctgtcggtgaccattgacggcccctccaaggtgaagatggattgccaggagtgccctgagggctaccgcgtcacctatacccccatggcacctggcagctacctcatctccatcaagtacggcggcccctaccacattgggggcagccccttcaaggccaaagtcacaggcccccgtctcgtcagcaaccacagcctccacgagacatcatcagtgtttgtagactctctgaccaaggccacctgtgccccccagcatggggccccgggtcctgggcctgctgacgccagcaaggtggtggccaagggcctggggctgagcaaggcctacgtaggccagaagagcagcttcacagtagactgcagcaaagcaggcaacaacatgctgctggtgggggttcatggcccaaggaccccctgcgaggagatcctggtgaagcacgtgggcagccggctctacagcgtgtcctacctgctcaaggacaagggggagtacacactggtggtcaaatgggggcacgagcacatcccaggcagcccctaccgcgttgtggtgccctgagtctggggcccgtgccagccggcagcccccaagcctgccccgctacccaagcagccccgccctcttcccctcaaccccggcccaggccgccctggccgcccgcctgtcactgcagctgcccctgccctgtgccgtgctgcgctcacctgcctccccagccagccgctgacctctcggctttcacttgggcagagggagccatttggtggcgctgcttgtcttctttggttctgggaggggtgagggatgggg

SEQ ID NO: 172 - DNA, 2320 bp, Homo sapiens
  mRNA (1)..(2320): gi|5454111|ref|NM_006286.1| Homo sapiens transcription factor Dp-2 (E2F dimerization partner 2) (TFDP2)
gaattccggtgcagtgagaggcatgcttccttagaccaggcaacatttcatttgttgcatttccagtttccaataccaactcacctacaaagattttaccaaaaaccttaggaccaataaatgtgaatgttggaccccaaatgattataagcacaccacagagactaaccagttcaggaagtgttctgattgggagtccatatacccctgcaccagcaatggttactcagacacacatagcagaagctactggctgggtccctggtgatagaaaacgggctagaaaatttatagactctgatttttcagaaagtaaacgaagcaaaaaaggagataaaaatgggaaaggcttgagacacttttcaatgaaagtgtgtgagaaagttcaacgaaaaggtacaacatcgtacaatgaagtcgctgatgagctggtgtcagagttcaccaattcaaataaccatttggctgctgattcgcaggcttatgatcagaagaacattaggcgaagagtttatgatgctttaaatgtgctaatggcaatgaacataatttcaaaggaaaaaaaagaaatcaagtggattggcctgcctaccaattctgctcaggaatgtcagaatctggagatagagaagcagaggcggatagaacggataaagcagaagcgggcccagctgcaagaacttctcctacagcaaatcgctttcaaaaacctggtacagagaaatcgacaaaatgagcagcaaaaccagggcccgccggctctgaactctaccattcagctgccattcataatcatcaatacaagcagaaaaacagtcatagattgcagcatctccagtgacaagtttgagtatcttttcaattttgacaacacctttgagatccatgatgacatagaagtactaaagcggatgggaatgtcgtttggcctggagtcaggcaaatgctctctggaggatctgaaacttgcgaaatccctggtgccaaaggctttagaaggttatatcacagatatctccacaggaccttcttggttaaatcagggactacttctgaactctacccaatcagtttcaaatttagacctgaccactggtgccaccttaccccagtcaagtgtaaaccaagggttatgcttggatgcagaagtggccttagcaactgggcagttcctggccccaaacagtcaccagtccagcagtgcggcctctcactgctccgagtcccgaggcgagaccccctgttcgttcaatgatgaagatgaggaagatgatgaggaggattcctcctccccagaataaagacaagagaaagcctacgtttcaatatgtgatgctcatgtgtgtttgtagtgtgagctcttgtttttgaaatgattgcttcagtctttgcctttgtttgcactgtgtgttcagtgaaaactagagaaacacaataagcaaatcacatgaaggctgagatgattgagatgaaagttaacatagtgtgaatgaaagtctggccaacagagcagtagatgatataacacagaaagcatgctttctgaggagatagtggggataatccctgaagagttggcagtgtgagtccaactcatttatcttctgtgaggtgggatttttgtgttccctcaccacccatgtaatattcttagaattgagattgctacacggagcagtccttgacgatcgtgtttctgacgtttctcttccttgcctggactgcctttgacaaggcagaaatgaacatgaaaagtccccaggagaggggagctgtgtagtgagggatactgagggcagtcctgtggctgaggggcacagattgaactgctgaactagttggaggtctagatgaggtgctttacgcatcagctgccttagacagcttctagaaaggagcgagcgctacttcttaagtacttaagtgacatttagataatttatagtaaaactgaaattattattagccaatgcattggtgcatagaatttactagggctacttctggaagcccccaatagaatagcatttccatgtgcattaaatactttgccagcactgcctttgccagcatcctaaatctggagttttaccaagaaggaaactgtatctttaggttaatccaagctatgcatttcatatagctttttcatttaaaacaaggcaaagaaacaaattcctatgaccaaattgcttgcctacagttccctgcagtaattgtatgatctcacccagtgtgcaatttgtggaaatgaaccaaatgtcattacttttgtcttaaagaaaagtctatttcaagaatatggacagcagtggaaaaa

SEQ ID NO: 173 - DNA, 3567 bp, Homo sapiens
  mRNA (1)..(3567): gi|22035557|ref|NM_145685.1| Homo sapiens BRF1 homolog, subunit of RNA polymerase III transcription initiation factor IIIB (S. cerevisiae) (BRF1), transcript variant 3
gtggcatggggcactggctttgctgatgaggagaccagacttcagaggccgtgtcacctggcctgggccgcacagctggtgcatgccaagctcgcgtgcagacgaagctccagaggcctggctgtcaggagggttcctccccgaggacacacacgcaacctcctggaccgccaggctttagacttttaaaacttccatatgcaggaaaccccacaggacgcagccagcatctcgggtcatgggtgcacctgtcaccgcagtcctgggctaaacagtgaacaggagctctgtgtctctgtggtcgttacagttgtagtgaatgttccctgggagagtcctcttcagaagatatttgcggtattttcaacaaaggactctccaggatggaggagcaactacaagtcaggaaggaaaaggctgacaacccagttttttaaaaaacgggcaaaggacgtgaacagacaccatgcaatggcccagagtgcacaaatcatcatttctcccaggaatggggtgcccgagcccccaggcggctgaacttgagacttgtcacgtagtgttggtggaatgcagagcagctggagatcacctgctgcaggtgggtgcgtaactccgcacggccaagccgtttggaaagctgtagcatatgcatgagagtccggaaagttccgagagaaagtgtgtggatgcacccgccaaggacacacccaccgaggccacagctgcgatttcatagtgtgggaccccactggcaaagacacgctggctgctgtggccgtggtttctgtcccagccgtctgtttccatagaaaaagacccgtgcctgtatattccacgctttgcgcacctgctggaattcggggagaagaaccacgaggtgtccatgactgccctgaggctcctacagaggatgaagcgggactggatgcacacaggccggcgcccctcgggcctctgcggagcagcgctcctggttgcagccagaatgcatgacttcaggaggactgtgaaggaggtcatcagtgtggtcaaagtgtgtgagtccacgctgcggaagaggctcacggaatttgaagacacccccaccagtcagttgaccattgatgagttcatgaagatcgacctggaggaggagtgcgaccccccctcgtacacagctgggcagaggaagctgcggatgaagcagcttgaacaagtcctgtcaaaaaaactggaggaggttgaaggtgaaatatccagttaccaggatgcaattgagattgaactagaaaacagccggccaaaggccaaggggggcctggccagcctggcaaaagatggctccaccgaggacaccgcgtccagcttgtgtggcgaggaggacacagaggacgaggagctggaagccgcggccagccacctgaacaaagacttataccgggagctccttggtggtgcccccggcagctcggaagcagcaggaagccccgagtggggcggcagacctccggccctggggtccctgctggaccccctccccactgcagccagcctgggcatctcagactccatccgcgaatgcatctcctctcagagcagcgaccccaaagatgcttcaggagacggtgagctggacctcagtggcattgatgacctggagattgacaggtacatcctgaatgagtcggaagcccgcgtgaaggccgagctgtggatgagggagaacgccgagtacctgcgggaacagagggaaaaagaagcaagaatagcgaaagagaaggagctcggcatctacaaggaacacaagcccaagaagtcttgcaagcgacgggagccaattcaggccagtaccgccagggaggccatcgagaagatgctggagcagaagaagatctccagcaagatcaattatagcgtgctccggggcctcagcagcgccggcgggggcagtccgcacagggaggatgcacagcccgagcatagcgccagtgccaggaagctgtcacgaaggaggacgccggccagcagaagtggggctgaccctgtgaccagtgtggggaaaaggttgaggcctctggtgtctacgcagccagcaaagaaggtggccacgggagaggctttgctcccaagctctcccaccctcggagctgagcctgccaggccccaggcggtgctggtggagagcgggcccgtgtcataccacgccgacgaggaggctgacgaggaggagcctgacgaggaggacggggagccctgcgtcagtgccctgcagatgatgggcagcaacgactatggctgtgatggcgatgaggacgacggctactgaagtgtggcctccaggcaggtgatgtcctggcagggggcctcgcgggtctcctcagcatcagacgggcttccaggaccgcagcaggcaggccccagcgccgagactcctggtgacaggtggcacctgtcccacagccctcgtcccatgtggaacttaccattgggattgtgtttctattcagcaagggaaaccggaccaagcgtctgcatgtgtgtgatcagatgtgggccgggtgtgtgcagggctgggtcccgctgcctgccgtcgactcatccaaggaccctccaaggctggcagtgtggtgttgctactattaaggaaacaggcttggggcagccccactgctggtccaagtgtgtggagggctgagtgtgctggccctgtgactcaggaccagctctggagtctccagcccaccctccgcaccgtcccctcctgagcagcactcggcgccagcagcctctgccagagtggaagccagagccctgcaggtgtccggcgcagccgtgggagctgaggatctggcacttgagaggcagcagctccttgaaggtcctctgcctccagctgtggccctgcatccagatacctgcctcgtccgaggcagacacccccacccctgcctcctccagacccccctccccgctgcctgcaccgcctggagcagcatgggggtcagacccctgctccagggccacttgagttgtgggcccaggagccctgcggctgccggcaggtgaactgagtgcccgacagctgagaccggcgcccacccgtcctgagcatagctctgtaggcagtgcgggcatagcctgcatagtgtcctggcgctgggagttgcccgtggacagagccagagggcagtggcgctccctgtcagagctggatcaggccccccatcgaggagggagggcagacggaggcccgagagcctccccaggcctcttcgtgggaaggccccagtaccactcgtaggaggtctcagctctggcatggctgccccggatgtggccgagggggcttcaccctgtgtccttaggagggggtggccttgaggcagagccgtgcctcactgaccccaggggcctcatcctccccatggaatgggctgtatgtcctgccccaacttggcccgcagcaggccagacccccctacccccgcccagagctcagtagccagcctgggtcctgccagggcttctcgagggcttgggggaagaatagatttagtaaagcaggaagatctgttgttacttaacaga

SEQ ID NO: 174 - DNA, 8266 bp, Homo sapiens
  mRNA (1)..(8266): gi|38146098|ref|NM_003103.5| Homo sapiens SON DNA binding protein (SON), transcript variant g
ggagcctggaggactagcgaggaggagttgagagaacggagcggacgccatggcgaccaacatcgagcagatttttaggtctttcgtggtcagtaaattccgggaaattcaacaggagctttccagtggaaggaatgaaggccagctgaatggtgaaacaaatacacccattgaaggaaaccaggcgggtgatgcagctgcctctgccaggagtctaccaaatgaagaaatagtgcagaagatagaggaagtactttctggggtcttagatacagaactacgatataagccagacttgaaagagggctccagaaaaagtagatgcgtatctgtacaaacagatcctactgatgaaattcccactaaaaagtcaaagaagcataaaaagcacaaaaacaaaaagaagaaaaagaagaaagaaaaggaaaaaaaatataaaagacagccagaagaatctgagtcaaagacgaaatctcatgatgatgggaacatagatttagaatctgattcctttttaaagtttgattctgaaccttcagctgtggcgctggagcttcctacaagagcatttggcccatctgagaccaatgaatcccctgcagttgtgctagaacctcctgtagtatcaatggaggtatcagagccacacatcttagaaactctgaagccagctacaaaaactgcagaactgtcagttgtatctacatcagtaatctcagagcagtcagagcagtctgtggcagtaatgccagaaccatccatgacaaagattctggattcctttgcagcagcaccagtgcctactacaacactggtgttgaagtcatctgagccagttgtaacaatgtcagtggagtatcagatgaagtctgtgctgaaatctgtggagagcacatctccagagccatcaaagatcatgttggtagagcccccagtagcaaaagtgttagagccttcagaaacccttgtggtatcatcagagacacctactgaggtgtaccctgagccaagcacatcaacaacaatggattttccagagtcatctgccattgaagcgctaagattgccagagcagcctgtagacgtaccatcggagattgcagattcatccatgacaagaccgcaggagttgccggagctgcctaagaccacagcgttggagctgcaggagtcgtcggtggcctcagcgatggagttgccggggccacctgcgacctccatgccggagttgcaggggccccctgtgactccagtgctggagttacctgggccctctgctaccccggtgccagagttgccagggcccctttctaccccagtgcctgagttgccagggccccctgcgacagcagtgcctgagttgccagggccctctgtgacaccagtgccacagttgtcgcaggaattgccagggcttccagcaccatccatggggttggagccaccacaggaggtaccagagccacctgtgatggcacaggagttgccagggctgcctttggtgacagcagcagtagagttgccagagcagcctgcggtaacagtagcaatggagttgaccgaacaacctgtgacgacgacagagttggagcagcctgtggggatgacaacggtggaacatcctgggcatcctgaggtgacaacggcaacagggttgctggggcagcctgaggcaacgatggtgctggagttgccaggacagccagtggcaacgacagcgctggagttgccggggcagccttcggtgactggggtgccagagttgccagggctgccttcggcaactagggcactggagttgtcggggcagcctgtggcaactggggcactagagttgcctgggccgctcatggcagctggggcactggagttctcggggcagtctggggcagctggagcactggagcttttggggcagcctctggcaacaggggtgctggagttgccagggcagcctggggcgccagagttgcctgggcagcctgtggcaactgtggcgctggagatctctgttcagtctgtggtgacaacatcggagctgtcaacgatgaccgtgtcgcagtccctggaggtgccctcgacgacagcgctggaatcctataatacggtagcacaggagctgcctactacattagtgggggagacttctgtaacagtaggagtggatcccttgatggccccagaatcccatatattagcttctaacaccatggagacccatatattagcatccaacaccatggactcccaaatgctagcgtccaacaccatggactcccagatgttagcaactagcactatggactcccagatgttagcaaccagttccatggactcccagatgttagcaaccagctccatggactcccagatgttagcaaccagctccatggactcccagatgttagcaaccagctccatggactcccagatgttagcaaccagcaccatggattctcagatgttagcaaccagcaccatggactcccagatgttagcaactagctcaatggattcccagatgttagcatctggcactatggactctcaaatgttagcttctggcaccatggatgctcagatgttagcgtctggtaccatggatgcccagatgttagcgtctagtacccaagattctgctatgttgggttcaaaatctcctgatccctataggttagctcaggatccttacaggttagctcaggatccctataggttgggccatgacccctatagattaggtcatgatgcttacaggttaggacaagacccttatagattaggccatgatccctacagactaactcctgatccctataggatgtcacctagaccctacaggatagcacccaggtcctatagaatagcacccaggccatataggttagcacctagacccctgatgttagcatctagacgttctatgatgatgtcctatgctgcagaacgttccatgatgtcatcttacgaacgctctatgatgtcttatgagcggtctatgatgtcccctatggctgaacgctctatgatgtcagcctacgagcgctctatgatgtcagcctacgagcgctctatgatgtcccctatggctgagcgctctatgatgtcagcttatgaacgctccatgatgtcagcttatgaacgctccatgatgtccccaatggctgatcgatctatgatgtccatgggtgctgaccggtctatgatgtcgtcatactctgctgctgaccggtctatgatgtcatcgtactctgcagctgaccgatctatgatgtcatcttatactgctgatcgttcaatgatgtctatggctgctgattcttacaccgattcttacactgacacatatacagaggcatatatggtgccacctttgcctcctgaagagcccccaacaatgccaccgttgccacctgaggagccaccaatgacaccaccattgcctcctgaggaaccaccagagggtccagcattgcccactgagcagtcagcattaacagctgaaaatacttggcctacagaggtgccatcattaccatctgaagagtctgtatcgcagcctgagcctcctgtgagtcaaagtgagatttcggagccttcagcagtgcctactgattattcagtgtcagcatcagatccctcagttttagtatcagaggctgctgtgactgttccagaaccaccaccagagccagaatcttcaattacgttaacacctgtagagtctgcagtagtagcagaagaacatgaagttgttccagagagaccagtgacttgtatggtatctgaaactcccgccatgtcagctgaaccaactgtgttagcatcagagcctcctgttatgtcagagacagcagaaacatttgattccatgagagcctcaggacatgttgcctcagaagtatctacatccttgttggttccagcagtaactactccagtgctggcagagagcattctggagccgccagccatggctgccccagagtcttcagctatggctgtcctggagtcttcggctgtgaccgtcctggagtcttcgactgtgactgtcctggagtcttcgactgtaactgtcctggagccttcggttgtgactgtcccggagcctcctgttgtggctgagccagactatgttaccattcctgtgccagttgtttctgcgctggagccttctgtgcctgttctggaaccagcggtgtcagtccttcaaccttctatgattgtttcagaaccatctgtttctgtccaggaatcgactgtgacagtttcagagcctgctgtcacagtctcagagcagactcaagtaataccaactgaggtggctatagagtccacaccaatgatactggaatctagtatcatgtcatcacatgttatgaaaggaattaatctatcctctggtgatcaaaatcttgctccagagattggcatgcaggagattgcattgcattcaggtgaagaaccacatgctgaggaacacctgaaaggtgacttttacgaaagtgaacatggtataaatatagaccttaatataaataatcatttaattgctaaagagatggaacataatacagtgtgtgctgctggtactagtcctgttggggaaattggtgaagagaaaattttgcccaccagtgagactaaacagtgcacagtattggatacctaccctggtgttagtgaagctgatgcaggagaaactctatcttctactggtccttttgctctggaacctgatgcaacaggaactagtaagggtattgaatttaccacagcatctactctcagtttagttaataaatatgatgttgatttatctttaactactcaagatactgaacatgacatggtaatttccaccagtcctagtggtggtagtgaagctgacattgaagggcctttgcctgctaaagatattcatcttgatttaccatctaataataaccttgttagtaaggatacagaagaaccattacctgtaaaagagagtgaccagacattagcagctctgctcagccctaaagaaagtagtggaggagaaaaagaagtacctccccctcctaaagagacactgcctgattcaggattttctgccaatattgaggatattaatgaagcagatttagtgagaccgttacttcctaaggacatggaacgtcttacaagccttagagctggcattgaaggacctttacttgcaagtgatgttggacgtgacagatctgctgccagcccggttgtaagtagtatgccagaaagagcttcagagtcttcttcagaggaaaaagatgattatgaaatttttgtaaaagttaaggacactcacgaaaaaagcaagaaaaataagaaccgtgataagggggagaaagagaagaaaagagactcttcattaagatctcgaagtaagcgttccaaatcttctgaacacaaatcacgcaagcgtaccagtgaatctcgttctagggcaagaaagagatcatctaagtccaagtctcatcgctctcagacacgttcacggtcacgttcaagacgcaggaggagaagcagcagatcaagatcaaagtctagaggaagaagatctgtatcaaaagagaagcgcaaaagatctccaaagcacagatccaagtctagggaaagaaaaagaaaaagatcaagctccagggataaccgaaagacagttagagctcgaagtcgaaccccaagtcgtcggagtcggagtcatactccaagtcgtcgacgaaggtctagatctgtgggtagaagaaggagctttagcatttccccaagccgccgcagccgcacccccagccgccgcagccgcacccccagccgccgcagccgcacccccagccgccgcagccgcacccccagccgccggagccgcacccctagccgtcggagccgcaccccaagccgccggagaagatcaaggtctgtggtaagaagacgaagcttcagtatctcaccagtcagattaaggcgatcaagaacacccttaagaagaaggtttagcagatctcccatccgtcgtaaaagatccaggtcttctgaacgaggcagatcacccaaacgtctgacagatttggataaggctcaattacttgaaatagccaaagctaatgcagctgccatgtgtgctaaggctggtgtccctttaccaccaaacctaaagcctgcacctccacctactatagttgagaaagttgctaaaaagtcaggaggagctactatagaagaactaactgagaaatgtaaacagatcgcacagagtaaagaagatgatgatgtaatagtgaataaacctcatgtttcggatgaagaggaagaagaacctcctttttatcatcatccctttaaactcagtgaatttaaacctatttttttcaatctgaatattgctgcagcaaaaccaactccaccaaaaagccaggtaacattaacaaaagaattccctgtatcatctggatctcaacatcggaaaaaagaagcggatagtgtttatggagaatgggttcctgtggagaaaaatggtgaagaaaacaaagatgatgataatgttttcagcagcaatttgccctcagagcctgtggacatctctacagcaatgagtgaacgggcacttgctcagaaaagactcagtgagaatgcatttgatcttgaagccatgagcatgttaaatagagctcaggaaaggattgatgcctgggctcagctgaactctattcctggccagttcacaggaagtacaggagtacaggttttgacacaagaacagttggccaatactggtgcccaagcctggattaaaaaggatcagttcttaagagcagccccggtaactggaggaatgggagccgttttgatgagaaaaatgggctggagagaaggagaaggattaggaaaaaacaaagaaggcaataaggaacccatcctagttgattttaagacagaccgaaaaggtcttgttgcagtaggagaaagagcacaaaagaggtctgggaacttctctgctgcaatgaaagatctgtcaggcaaacatcctgtgtctgctttgatggagatctgtaataaaagaaggtggcaaccacctgaatttctattggtccatgatagtggccctgatcatcgcaaacattttctctttagggtattgagaaatggaagcccttaccagcccaattgtatgtttttcttgaataggtattgataaatggaagcgcttaccagcccagctttgccagccctaataagaagcatgctaaagccacagcagctactgtggttcttcaagcaatgggccttgtaccaaaggacctcatggctaatgcacttgcttcaggagtgcctcacgtagatagattgaggttttataataatcatttcagaattttactctgcatcacaatgtatttcctctttaatgttgtaaatatttggcaatttaagacattgtgtaaaaagcaatctgtaaaaacatctccaggctttgatttttgtaccatggaaattgtatttaaccatacagggttttggtatgtttatattgtttaccttagtgatgtatttgtttaagtggctaacatccaaacgactgtttgaaggcatcagagtaatcttcagtgtggaatgttaaataacgcttttatactgtattttgtactatgatgtaactccccttccttatggctaggctactgtaacacttgcctgtaatcagtgaagggctgtgcaccttgtactatttcacaatgggttctgctggacagataatgggccagtgttattgaggtgatcaagatctgttccacagggctaatgccaccatctcccctcaaaattttgtagaggttctaaaaagaaagtggtatgttgtgtgatgatcagcactaagtcctgcattcctgttaaagccacttgggtcataagaagggagtaaaaaatgaagtctgactagaattctattggcagaggccaagtacatttagtatggcattgagttgtgatatagttttactttgatgtgcattttgaatttcagctacacctagatagacgtaaaatgataattaaaatgctgtaaccaacttatctaataaaattggcaaccagccactattttgttgactatgagaaagttaaaagtttatgttaatttttagggtctgatagaatatttcatgtgtattacagtggtattcatatgctatgtctctaaactttattttcaaaagcttaaggcccaaatacaaacttctctggaata

SEQ ID NO: 175 - DNA, 4205 bp, Homo sapiens
  mRNA (1)..(4205): gi|24797084|ref|NM_002265.4| Homo sapiens karyopherin (importin) beta 1 (KPNB1)
ctccctcgctccctccctgcgcgccgcctctcactcacagcctcccttccttctttctccctccgcctcccgagcaccagcgcgctctgagctgcccccagggtccctcccccgccgccagcagcccatttggagggaggaagtaagggaagaggagaggaaggggagccggaccgactacccagacagagccggtgaatgggtttgtggtgacccccgccccccaccccaccctcccttcccacccgacccccaacccccatccccagttcgagccgccgcccgaaaggccgggccgtcgtcttaggaggagtcgccgccgccgccacctccgccatggagctgatcaccattctcgagaagaccgtgtctcccgatcggctggagctggaagcggcgcagaagttcctggagcgtgcggccgtggagaacctgcccactttccttgtggaactgtccagagtgctggcaaatccaggaaacagtcaggttgccagagttgcagctggtctacaaatcaagaactctttgacatctaaagatccagatatcaaggcacaatatcagcagaggtggcttgctattgatgctaatgctcgacgagaagtcaagaactatgttttgcagacattgggtacagaaacttaccggcctagttctgcctcacagtgtgtggctggtattgcttgtgcagagatcccagtaaaccagtggccagaactcattcctcagctggtggccaatgtcacaaaccccaacagcacagagcacatgaaggagtcgacattggaagccatcggttatatttgccaagatatagacccagagcagctacaagataaatccaatgagattctgactgccataatccaggggatgaggaaagaagagcctagtaataatgtgaagctagctgctacgaatgcactcctgaactcattggagttcaccaaagcaaactttgataaagagtctgaaaggcactttattatgcaggtggtctgtgaagccacacagtgtccagatacgagggtacgagtggctgctttacagaatctggtgaagataatgtccttatattatcagtacatggagacatatatgggtcctgctctttttgcaatcacaatcgaagcaatgaaaagtgacattgatgaggtggctttacaagggatagaattctggtccaatgtctgtgatgaggaaatggatttggccattgaagcttcagaggcagcagaacaaggacggccccctgagcacaccagcaagttttatgcgaagggagcactacagtatctggttccaatcctcacacagacactaactaaacaggacgaaaatgatgatgacgatgactggaacccctgcaaagcagcaggggtgtgcctcatgcttctggccacctgctgtgaagatgacattgtcccacatgtcctccccttcattaaagaacacatcaagaacccagattggcggtaccgggatgcagcagtgatggcttttggttgtatcttggaaggaccagagcccagtcagctcaaaccactagttatacaggctatgcccaccctaatagaattaatgaaagaccccagtgtagttgttcgagatacagctgcatggactgtaggcagaatttgtgagctgcttcctgaagctgccatcaatgatgtctacttggctcccctgctacagtgtctgattgagggtctcagtgctgaacccagagtggcttcaaatgtgtgctgggctttctccagtctggctgaagctgcttatgaagctgcagacgttgctgatgatcaggaagaaccagctacttactgcttatcttcttcatttgaactcatagttcagaagctcctagagactacagacagacctgatggacaccagaacaacctgaggagttctgcatatgaatctctgatggaaattgtgaaaaacagtgccaaggattgttatcctgctgtccagaaaacgactttggtcatcatggaacgactgcaacaggttcttcagatggagtcacatatccagagcacatccgatagaatccagttcaatgaccttcagtctttactctgtgcaactcttcagaatgttcttcggaaagtgcaacatcaagatgctttgcagatctctgatgtggttatggcctccctgttaaggatgttccaaagcacagctgggtctgggggagtacaagaggatgccctgatggcagttagcacactggtggaagtgttgggtggtgaattcctcaagtacatggaggcctttaaacccttcctgggcattggattaaaaaattatgctgaataccaggtttgtttggcagctgtgggcttagtgggagacttgtgccgtgccctgcaatccaacatcatacctttctgtgacgaggtgatgcagctgcttctggaaaatttggggaatgagaacgtccacaggtctgtgaagccgcagattctgtcagtgtttggtgatattgcccttgctattggaggagagtttaaaaaatacttagaggttgtattgaatactcttcagcaggcctcccaagcccaggtggacaagtcagactatgacatggtggattatctgaatgagctaagggaaagctgcttggaagcctatactggaatcgtccagggattaaagggggatcaggagaacgtacacccggatgtgatgctggtacaacccagagtagaatttattctgtctttcattgaccacattgctggagatgaggatcacacagatggagtagtagcttgtgctgctggactaataggggacttatgtacagcatttgggaaggatgtactgaaattagtagaagctaggccaatgatccatgaattgttaactgaagggcggagatcgaagactaacaaagcaaaaacccttgctacatgggcaacaaaagaactgaggaaactgaagaaccaagcttgatctgttaccattgggatgataacctgaggacccccactggaaatctcccatcttttgaaaaacctggaagtgaggagtgtgcacggatgctgaatgtttgggaatgagaggatgagtgagtgaggcttgaaaacacaccacattgaaaatcctgccacagcagcagccgcagccgccaacagcagcgctgttagtgagctaagtaagcactgacttcgtagaaaaccataacatcggccatcttggaaaagagaaaaacaatggagttacttatttaaaaaaaaagaaagaaagttatctcttcccaggagaggctagaagtagcttttctgtcttttggccagtgccgagtggaatgcctggtttgggggaggaggagggactgggttcagctgtggtgctttgttgtaaaaggcagcctggcctttgctactgaggagaaagatggagcctgggtctcaagcccaccttcgctgtacctttgccacatggtactgtatgcttgccagctagaaggagggtcagggattttttacagtctgagaatgagtgtgtgtgagtgaggcggtatccacattctcaacttcaagtcattgcagtttctttttcccagaaaacaaggggttagatgttgcatttcataaaactaaccgaagttctgtctactgatgcagcacaagagatgtaaaaaaaaaaaaaaaaaaaaaaaaaaaaacacacacacagaggaaagacgctctttaggttttgttttgttttttttttttggttttgttttttgttttttttactctagggaaaacactgacgaatggtcagagctcctatcctgatcttttcatcaaggcgcctttcctaataatatggttcaactgtgaatgtagaagtgggggggaggggggagaaaaagaaaactctggcgttagaggatatagaaaaatataagtacaattgttacaaataacgcagacttcaaaaacaaaaaaatcacaacccaaacaaaccaaaatttaaatgatcagaattggcagcacaaagaaaacgccctctcctgacttgtattgtggcagtctgaacgcccccagaaaattgtgccaaagagtttagaaaaataaatatacaataaaagtaaacacatacacacaaaacagcaaacttcaggtaactattttggattgcaaacaggataaattaaatgttcaaacaatctgataaaataaccatttggaaactgaaaa

SEQ ID NO: 176 - DNA, 3768 bp, Homo sapiens
  mRNA (1)..(3768): gi|33469920|ref|NM_005915.4| Homo sapiens MCM6 minichromosome maintenance deficient 6 (MIS5 homolog, S. pombe) (S. cerevisiae) (MCM6)
aagctgcagcgtctggaaaaaagcgacttgtggcggtcgagcgtggcgcaggcgaatcctcggcactaagcaaatatggacctcgcggcggcagcggagccgggcgccggcagccagcacctggaggtccgcgacgaggtggccgagaagtgccagaaactgttcctggacttcttggaggagtttcagagcagcgatggagaaattaaatacttgcaattagcagaggaactgattcgtcctgagagaaacacattggttgtgagttttgtggacctggaacaatttaaccagcaactttccaccaccattcaagaggagttctatagagtttacccttacctgtgtcgggccttgaaaacattcgtcaaagaccgtaaagagatccctcttgccaaggatttttatgttgcattccaagacctgcctaccagacacaagattcgagagctcacctcatccagaattggtttgctcactcgcatcagtgggcaggtggtgcggactcacccagttcacccagagcttgtgagcggaacttttctgtgcttggactgtcagacagtgatcagggatgtagaacagcagttcaaatacacacagccaaacatctgccgaaatccagtttgtgccaacaggaggagattcttactggatacaaataaatcaagatttgttgattttcaaaaggttcgtattcaagagacccaagctgagcttcctcgagggagtatcccccgcagtttagaagtaattttaagggctgaagctgtggaatcagctcaagctggtgacaagtgtgactttacagggacactgattgttgtgcctgacgtctccaagcttagcacaccaggagcacgtgcagaaactaattcccgtgtcagtggtgttgatggatatgagacagaaggcattcgaggactccgggcccttggtgttagggacctttcttataggctggtctttcttgcctgctgtgttgcgccaaccaacccaaggtttggggggaaagagctcagagatgaggaacagacagctgagagcattaagaaccaaatgactgtgaaagaatgggagaaagtgtttgagatgagtcaagataaaaatctataccacaatctttgtaccagcctgttccctactatacatggcaatgatgaagtaaaacggggtgtcctgctgatgctctttggtggcgttccaaagacaacaggagaagggacctctcttcgaggggacataaatgtttgcattgttggtgacccaagtacagctaagagccaatttctcaagcacgtggaggagttcagccccagagctgtctacaccagtggtaaagcgtccagtgctgctggcttaacagcagctgttgtgagagatgaagaatctcatgagtttgtcattgaggctggagctttgatgttggctgataatggtgtgtgttgtattgatgaatttgataagatggacgtgcgggatcaagttgctattcatgaagctatggaacagcagaccatatccatcactaaagcaggagtgaaggctactctgaacgcccggacgtccattttggcagcagcaaacccaatcagtggacactatgacagatcaaaatcattgaaacagaatataaatttgtcagctcccatcatgtcccgattcgatctcttctttatccttgtggatgaatgtaatgaggttacagattatgccattgccaggcgcatagtagatttgcattcaagaattgaggaatcaattgatcgtgtctattccctcgatgatatcagaagatatcttctctttgcaagacagtttaaacccaagatttccaaagagtcagaggacttcattgtggagcaatataaacatctccgccagagagatggttctggagtgaccaagtcttcatggaggattacagtgcgacagcttgagagcatgattcgtctctctgaagctatggctcggatgcactgctgtgatgaggtccaacctaaacatgtgaaggaagctttccggttactgaataaatcaatcatccgtgtggaaacacctgatgtcaatctagatcaagaggaagagatccagatggaggtagatgagggtgctggtggcatcaatggtcatgctgacagccctgctcctgtgaacgggatcaatggctacaatgaagacataaatcaagagtctgctcccaaagcctccttaaggctgggcttctctgagtactgccgaatctctaaccttattgtgcttcacctcagaaaggtggaagaagaagaggacgagtcagcattaaagaggagcgagcttgttaactggtacttgaaggaaatcgaatcagagatagactctgaagaagaacttataaataaaaaaagaatcatagagaaagttattcatcgactcacacactatgatcatgttctaattgagctcacccaggctggattgaaaggctccacagagggaagtgagagctatgaagaagatccctacttggtagttaaccctaactacttgctcgaagattgagatagtgaaagtaactgaccagagctgaggaactgtggcacagcacctcgtggcctggagcctggctggagctctgctagggacagaagtgtttctggaagtgatgcttccaggatttgttttcagaaacaagaattgagttgatggtcctatgtgtcacattcatcacaggtttcataccaacacaggcttcagcacttcctttggtgtgtttcctgtcccagtgaagttggaaccaaataatgtgtagtctctataaccaatacctttgttttcatgtgtaagaaaaggcccattacttttaaggtatgtgctgtcctattgagcaaataactttttttcaattgccagctactgcttttattcatcaaaataaaataacttgttctgaagttgtctattggatttctttctactgtaccctgattattacttccatctacttctgaatgtgagactttccctttttgcttaacctggagtgaagaggtagaactgtggtattatggatgaggtttctatgagaaggagtcattagagaactcatatgaaagctagaggccttagagatgactttccaaggttaattccagttgtttttttttttttttaagtttataaaagtttattatacttttttaaaattactctttagtaatttattttacttctgtgtcctaagggtaatttctcaggattgttttcaaattgcttttttaggggaaataggtcatttgctatattacaagcaatccccaaattttatggtcttccaggaaaagttattaccgtttatgatactaacagttcctgagacttagctatgatcagtatgttcatgaggtggagcagttcctgtgttgcagcttttaacaacagatggcattcattaaatcacaaagtatgttaaaggtcacaaaagcaaaataactgtctgaggctaaggcccacgtgggacagtctaatacccatgagtactcaacttgccttgatgtctgagctttccagtgcaatgtgaatttgagcagccagaaatctattagtagaaagcaagacagattaatataggttaaaacaatgatttaaatatgtttctcccaataattatctctttccctggaatcaacttgtatgaaaccttgtcaaaatgtactccacaagtatgtacaattaagtattttaaaaataaatggcaaacattaaaaacaaaaaaaaaaaaaaaaaaaa

SEQ ID NO: 177 - DNA, 4092 bp, Homo sapiens
  mRNA (1)..(4092): gi|5454157|ref|NM_006295.1| Homo sapiens valyl-tRNA synthetase (VARS)
gtcacaaaggggggaacacgtgggcgccggctgccggggcggcgatcttagggaactagggtcacctggagagccgcccaccgtctctgcccgctcgactcctccgcccgggccgctcggccggtccagccgcggccggcgcctggctgtgaggtggattcccggcccagtctgaccatctccctccagtttttccacttcgttcggaccttctcataactatgtccaccctctacgtctcccctcacccagatgccttccccagcctccgagccctcatagccgctcgctatggggaggctggggagggtcccggatggggaggagcccacccccgcatctgtctccagccacccccgactagcaggactccctttcccccaccccgcctgccggccctggagcaggggcccggtgggctctgggtgtggggggccacggctgtggcccagctgctgtggccagcaggcctggggggcccagggggcagccgggcggctgtccttgtccaacagtgggtcagttacgccgacacggagttaataccagctgcctgtggagcaacgctgccggccctgggactccgaagctcggcccaggacccccaggctgtgctgggggccctgggcagggccctgagccccttggaggagtggcttcggctgcacacctacttggccggggaggcccccactctggctgacctggcggctgtcacagccttgctgctgcctttccgatacgtcctagacccacctgcccgccggatctggaataatgtgactcgctggtttgtcacgtgtgtccggcagccagaattccgagccgtgctaggagaagtggttctatactcaggagccaggcctctctctcatcagccaggccccgaggctcctgccctcccaaagacagctgctcagctcaagaaagaggcaaagaaacgggagaagctagagaaattccaacagaagcagaagatccaacagcagcagccacctccaggggagaagaaaccaaaaccagagaagagggagaaacgggatcctggggtcattacctatgacctcccaaccccacccggggaaaagaaagatgtcagtggccccatgcccgactcctacagccctcggtatgtggaggctgcctggtacccttggtgggagcagcagggcttcttcaagccagagtatgggcgtcctaatgtgtcagcagcaaatccccgaggtgtcttcatgatgtgcatcccaccccccaatgtgacaggctccctgcacctgggccatgcactcaccaacgccatccaggactccctgactcgatggcaccgcatgcgtggggagaccaccctgtggaaccctggctgtgaccatgcaggtattgccacccaggtggtggtggagaagaagctatggcgtgagcagggactgagccggcaccagctgggccgcgaggcctttctacaggaagtctggaagtggaaggaggagaaaggtgaccggatttaccaccagttgaagaagcttggcagctccttggactgggatcgagcctgtttcaccatggaccctaaactctcagcagctgtgacagaggcctttgtccggcttcacgaggaaggcatcatctatcgcagtacccgccttgttaactggtcctgcaccctcaactccgccatctctgacattgaggtggataagaaggagctgacaggtcgcaccctgctctccgtgcctggctacaaggagaaggtggagttcggggtcctcgtgtcctttgcctataaggtccaaggctcagatagcgacgaggaggtggtggtggcaacaactcggatcgagacaatgctgggagatgtggctgtagctgtgcaccccaaagataccagataccagcacctgaaggggaagaacgtgatccacccattcctgtctcggagccttcccattgtcttcgatgaatttgtggacatggactttggcacaggtgctgtgaagatcacccccgcacatgaccaaaatgactatgaagttgggcagcggcacgggctggaggccatcagcatcatggactcccggggggccctcatcaatgtgcctccgcctttcctgggcctgcccaggtttgaggccaggaaagcggtgctggtggcgctgaaggagcggggactgttccgtggcattgaggacaaccccatggtggtgccactttgcaaccggtcgaaggacgtggtagagcctctgctgcggccgcagtggtacgttcgctgcggggagatggcccaggctgccagcgccgctgtgactcggggtgacctccgcatcctgcctgaggcccatcagcgcacatggcatgcctggatggacaacatccgggagtggtgcatttccaggcagctgtggtggggccatcgcatcccagcctactttgtcactgtcagtgacccagcggtgccccctggggaggaccctgatgggcggtactgggtgagtggacgcaatgaggcggaggcccgggagaaggcagccaaggagttcggagtgtcccctgacaagatcagtctccagcaagatgaggatgtattggatacctggttctcctctggcctcttccccttatccattttgggctggcccaaccagtcagaagacctgagtgtgttctaccccgggacactgctggagaccggtcatgacatcctcttcttctgggtggcccggatggtcatgctgggcctgaagctcacgggcaggctgccctttagagaggtctacctccatgccatcgtgcgagatgctcacggccggaagatgagcaagtctctaggcaatgtcatcgatcccctggatgtcatctatggaatctccctgcagggcctccacaaccagctgctgaacagcaacctggatcccagcgaggtggagaaggccaaagaagggcagaaagctgacttcccagcggggattcctgaatgtggcaccgatgctctccggtttggattatgtgcctacatgtcccagggtcgtgacatcaacctggatgtgaaccggatactgggttaccgccacttctgcaacaagctctggaatgccaccaagtttgcccttcgtggccttgggaagggttttgtgccctcacccacctcccagcccggaggccatgagagcctggtggaccgctggatccgcagccgcctgacagaggctgtgaggctcagcaatcaaggcttccaggcctacgacttcccggccgtcaccactgcccagtacagcttctggctctatgagctctgtgatgtctacttggagtgcctgaaacctgtactgaatggggtggaccaggtggcagctgagtgtgcccgccagaccctgtacacttgcctggacgttggcctgcggctgctctcacccttcatgcccttcgtgacggaggagctgttccagaggctgccccggaggatgccgcaagctccccctagcctctgtgttaccccctacccggagccctcagagtgctcctggaaggaccccgaggcagaagccgcccttgagctggcgctaagcatcacgcgagccgtgcgctccctgcgggccgactacaacctcacccggatccggcctgactgtttcctggaagtggcggatgaggccacgggcgccctggcatcggcggtgtcgggctacgtgcaggccctggccagcgcaggtgtggtggctgttctggccctgggggctcccgccccccagggttgcgctgtggctctggcttctgatcgctgctccatccacctgcagcttcaggggctggtggaccctgcacgggagctgggcaagctgcaagccaagcgagttgaggcccagcggcaggcccagcgtctgcgggaacgccgtgctgcctcgggctatcctgtcaaggtgccgctcgaagtccaggaggcagatgaagccaagctccaacagacagaagcagagctcaggaaggtggatgaggccatcgccctattccagaagatgctgtgatccaccacccagcttcacccctcacccccagcggctcaccatggggatggcagcaataaaatattttcccacaaaa

SEQ ID NO: 178 - DNA, 2587 bp, Homo sapiens
  mRNA (1)..(2587): gi|22027513|ref|NM_145810.1| Homo sapiens cell division cycle associated 7 (CDCA7), transcript variant 2
cccgagccccgcccctccgggcccgggtcggcgcgcccagcctgccagccgcgctgctgctgctcctcctgctgtgggaccgctgaccgcgcggctgctccgctctccccgctccaagcgccgatctgggcacccgccaccagcatggacgctcgccgcgtgccgcagaaagatctcagagtaaagaagaacttaaagaaattcagatatgtgaagttgatttccatggaaacctcgtcatcctctgatgacagttgtgacagctttgcttctgataattttgcaaacacgaggctgcagtcagttcgggaaggctgtaggacccgcagccagtgcaggcactctggacctctcagggtggcgatgaagtttccagcgcggagtaccaggggagcaaccaacaaaaaagcagagtcccgccagccctcagagaattctgtgactgattccaactccgattcagaagatgaaagtggaatgaattttttggagaaaagggctttaaatataaagcaaaacaaagcaatgcttgcaaaactcatgtctgaattagaaagcttccctggctcgttccgtggaagacatcccctcccaggctccgactcacaatcaaggagaccgcgaaggcgtacattcccgggtgttgcttccaggagaaaccctgaacggagagctcgtcctcttaccaggtcaaggtcccggatcctcgggtcccttgacgctctacccatggaggaggaggaggaagaggataagtacatgttggtgagaaagaggaagaccgtggatggctacatgaatgaagatgacctgcccagaagccgtcgctccagatcatccgtgacccttccgcatataattcgcccagtggaagaaattacagaggaggagttggagaacgtctgcagcaattctcgagagaagatatataaccgttcactgggctctacttgtcatcaatgccgtcagaagactattgataccaaaacaaactgcagaaacccagactgctggggcgttcgaggccagttctgtggcccctgccttcgaaaccgttatggtgaagaggtcagggatgctctgctggatccgaactggcattgcccgccttgtcgaggaatctgcaactgcagtttctgccggcagcgagatggacggtgtgcgactggggtccttgtgtatttagccaaatatcatggctttgggaatgtgcatgcctacttgaaaagcctgaaacaggaatttgaaatgcaagcataatatctggaaaatttgctgcctgccttctacttctcaaatctttcttgtaaaagtttccaattttttcactgaaacctgagttaaaaatcttgatgatcagcctgtttcataagaaactccaatcaagttaatcttagcagacatgtgtttctggagcatcacagaaggtatattgctagttacactttgccctcctgcagtttcttctctgctcccaacccccatctcatagcatccccctctatttccaatgctcctctccaaccgcttagtttctgaatttcttttaaattacagttttatgaaagcatattttatttacttggtgttgaaatagccctcataaaacctaagcacttggaaacacaataatagtattaactaactagatctattgaatttcagagaagagccttctaacttgtttacacaaaaacgagtatgatttagcattcatactagttgaaatttttaatagaatcaaggcacaaaagtcttaaaaccatgtggaaaaattaggtaattattgcagattgatgtctctcaatcccatgtattgcgcttatgttacaagttgttgtcacagttgagacttaatttctcctaatttcttctgcccgaagggtaagtggtgcgtccagcttacacaatcataattcaaaggttggtgggcaatgtaatacttaattaaaataatgatggaagagctatctggagattatgagtaagctgatttgaattttcagtataaaactttagtataattgtagtttgcaaagtttatttcagttcacatgtaaggtattgcaaataaattcttggacaattttgtatggaaacttgatattaaaaactagtctgtggttctttgcagtttcttgtaaatttataaaccaggcacaaggttcaagtttagattttaagcacttttataacaatgataagtgcctttttggagatgtaacttttagcagtttgttaacctgacatctctgccagtctagtttctgggcaggtttcctgtgtcagtattccccctcctctttgcattaatcaaggtatttggtagaggtggaatctaagtgtttgtatgtccaatttacttgcatatgtaaaccattgctgtgccattcaatgtttgatgcataattggaccttgaatcgataagtgtaaatacagcttttgatctgtaatgcttttatacaaaagtttattttaataataaaatgtttgttctaacttgtctgcttttttaaaaataatcttactgtacttaattctaattttttcctcatatttaaataaaaggccatttccaccttttct

SEQ ID NO: 179 - DNA, 2389 bp, Homo sapiens
  mRNA (1)..(2389): gi|20070259|ref|NM_015456.2| Homo sapiens cofactor of BRCA1 (COBRA1)
gccggggcctcggccatgttcgcggggctgcaggacctgggcgtggccaacggcgaggacctgaaggagaccctgaccaactgcacggagccgctcaaggccatcgagcagttccagacagagaatggtgtgctgctgccatctcttcagtcagccctccccttcttggacttgcacgggacgccgcggctggagttccaccagtcggtattcgatgagctgcgggacaagctgctggagcgagtgtcagccatcgcttcggaggggaaggctgaggaaaggtacaagaagctggaagaccttctggagaagagcttttctctggtgaagatgccgtccctgcagcccgtggtgatgtgcgtcatgaagcacctgcccaaggttccggagaaaaaactgaagctggttatggctgacaaggagctgtatcgagcctgcgccgtggaggtgaagcggcagatctggcaagacaaccaggccctcttcggggacgaggtttccccactcctgaagcagtacatcctggagaaggagagcgctctcttcagtacagagctctctgtcctgcacaactttttcagtccttcccccaagaccaggcgccagggcgaggtggtgcagcggctgacgcggatggtggggaagaacgtgaagctgtacgacatggtgctgcagtttctgcgcacgctcttcctgcgcacgcggaatgtgcactactgcacgctgcgggctgagctgctcatgtccctgcacgacctggacgtgggtgaaatctgcaccgtggacccgtgccacaagttcacctggtgcctggacgcctgcatccgagagcggttcgtggacagcaagagggcgcgggagctgcaggggtttctcgatggcgtcaagaaaggccaggagcaggtgctgggggacctgtccatgatcctgtgtgaccccttcgccatcaacacgctggcactgagcacagtcaggcacctgcaggagctggtcggccaggagacactgcccagggacagccccgacctcctgctgctgctccggctgctggcgctgggccagggagcctgggacatgatcgacagccaggtcttcaaggagcccaagatggaggtagagctcatcaccaggttcctcccgatgctcatgtccttcctggtggatgactacactttcaatgtggatcagaaacttccggctgaggagaaagccccagtctcatatccaaacacacttcccgaaagcttcactaagtttctgcaggagcagcgcatggcctgcgaggtggggctgtactacgtcctgcacatcaccaagcagaggaacaagaacgcgctcctccgcctgctgcccgggctggtggagacctttggcgacttggcctttggcgacatcttcctccacctgctcacgggcaaccttgcgctgctggccgacgaatttgcccttgaggacttctgcagcagcctcttcgatggcttcttcctcaccgcctctccaaggaaggagaacgtgcaccggcacgcgctgcggctcctcattcacctgcaccccagggtggccccatctaagctggaggcgttgcagaaggccctggagcctacaggccagagcggagaggcagtgaaggagctttactcccagctcggcgagaagctggaacagctggatcaccggaagcccagcccggcacaggctgcggagacgccggccctggagctgcccctccccagcgtgcccgcccctgccccgctctgagggccctccagacctgctcgggtgctggggccatgccgagtcgcggccctgctcagccggaagaggctcccggacctggatgtacagggcagtctctcttcccggggctatggctgggcctgtcctgccgtcatggccccctgcttcctgctccttggagctggctcccggaccttgcccaccatccatgcagtggctcccagggcagagcctctccttgtactttggcagccatagaaagcgtgctcattttctgttttcctgtgttaggaaaaaaccacctgttttccaaggggagagggcggggcctgagggtgggggcggggcctcttcattggcccagcttggcgaaagcgaggcacactgcttactgccttggggttgtggagatggacccgtgacctcgtggaggccgtgtgggggcagcagcctggcctgtgccatggtgggtgtcctggggcctgtgcggagggagccacctcaccctgcagcccaggttgcaggtgtggccttgtttctccttgcccagcagtgctgccttcagcggccgtgacggggccagctggacacacggtgagattttctcgtatgtaaataaaaggcaatttggtaaaaaaaaaaaaaaaaaaaa

What is claimed is:

1. A method of diagnosing whether a subject has, or is at risk for developing, a cancer, comprising determining the nucleotide sequence or the genomic structure of at least one hypermutated cancer gene product in a test sample from the subject, wherein an alteration in the nucleotide sequence or the genomic structure of the hypermutated cancer gene product in the test sample, relative to the nucleotide sequence or the genomic structure of a corresponding hypermutated cancer gene product in a control sample, is indicative of the subject either having, or being at risk for developing, a cancer.

2. The method of claim 1, wherein the at least one hypermutated cancer gene product is selected from the group consisting of NM_{—}001273, NM_{—}080921, NM_{—}014865, NM_{—}003072, NM_{—}004104, NM_{—}004990, NM_{—}004599, NM_{—}013417, NM_{—}172230, NM_{—}148842, NM_{—}021948, NM_{—}014014, NM_{—}001417, NM_{—}002271, NM_{—}005030, NM_{—}182917, NM_{—}001923, NM_{—}005762, NM_{—}005348, NM_{—}001418, NM_{—}002266, NM_{—}012218, NM_{—}002466, NM_{—}005557, NM_{—}000691, NM_{—}001569, NM_{—}001090, NM_{—}201524, NM_{—}002291, NM_{—}002230, NM_{—}001605, NM_{—}017647, NM_{—}002541, NM_{—}005438, NM_{—}133645, XM_{—}290401, NM_{—}000968, NM_{—}144733, NM_{—}004741, NM_{—}020414, NM_{—}004793, NM_{—}000224, NM_{—}006819, XM_{—}379877, NM_{—}001436, NM_{—}004247 and combinations thereof.

3. The method of claim 1, wherein the at least one hypermutated cancer gene product is selected from the group consisting of NM_{—}001273, NM_{—}080921, NM_{—}014865, NM_{—}003072, NM_{—}004104, NM_{—}004990, NM_{—}004599, NM_{—}013417, NM_{—}172230, NM_{—}148842, NM_{—}021948, NM_{—}014014, NM_{—}001417, NM_{—}002271, NM_{—}005030, NM_{—}182917, NM_{—}001923, NM_{—}005762, NM_{—}005348, NM_{—}001418, NM_{—}002266, NM_{—}012218, NM_{—}002466, NM_{—}005557, NM_{—}000691, NM_{—}001569, NM_{—}001090, NM_{—}201524, NM_{—}002291, NM_{—}002230, NM_{—}001605, NM_{—}017647, NM_{—}002541, NM_{—}005438, NM_{—}133645, XM_{—}290401, NM_{—}000968, NM_{—}144733, NM_{—}004741, NM_{—}020414, NM_{—}004793, NM_{—}000224, NM_{—}00681.9, XM_{—}379877, NM_{—}001436, NM_{—}004247, NM_{—}000967, NM_{—}199413, NM_{—}032044, NM_{—}013403, NM_{—}012469, NM_{—}003169, NM_{—}006470, NM_{—}021991, XM_{—}290506, NM_{—}153280, NM_{—}080686, NM_{—}000289, NM_{—}003875, NM_{—}024658, NM_{—}003074, NM_{—}152298, NM_{—}007126, NM_{—}139215, NM_{—}147200, XM_{—}290345, XM_{—}377464, NM_{—}021873, NM_{—}006429, NM_{—}015292, NM_{—}005956, NM_{—}001940, NM_{—}000526, NM_{—}001747, NM_{—}024311, NM_{—}003938, NM_{—}005336, NM_{—}003751, NM_{—}006839, NM_{—}000937, NM_{—}012112, NM_{—}006739, NM_{—}005916, NM_{—}138421, NM_{—}001379, NM_{—}006289, NM_{—}004939, NM_{—}001357, NM_{—}000422, NM_{—}002417, NM_{—}005968, NM_{—}003754, XM_{—}378197, NM_{—}002473, NM_{—}002972, NM_{—}000546, NM_{—}001102, XM_{—}374522, NM_{—}001458, NM_{—}172020, XM_{—}039701, NM_{—}000701, NM_{—}002298, NM_{—}015179, NM_{—}002967, NM_{—}018454, NM_{—}006796, NM_{—}005558, NM_{—}006812, NM_{—}003400, NM_{—}001034, NM_{—}004728, NM_{—}178313, NM_{—}145714, XM_{—}085722, NM_{—}001798, NM_{—}181054, NM_{—}001916, NM_{—}002668, NM_{—}052963, NM_{—}031243, NM_{—}002638, NM_{—}003146, NM_{—}005564, NM_{—}016292, XM_{—}375253, NM_{—}003815, NM_{—}001363, NM_{—}032271, NM_{—}000314, NM_{—}198830, NM_{—}032999, NM_{—}015935, NM_{—}134447, NM_{—}006928, NM_{—}014390, NM_{—}020117, NM_{—}001619, NM_{—}022820, NM_{—}005526, NM_{—}033500, NM_{—}001903, NM_{—}004844, NM_{—}006372, NM_{—}022743, NM_{—}007355, NM_{—}012426, NM_{—}000088, NM_{—}182926, NM_{—}004563, NM_{—}014612, NM_{—}004446, XM_{—}168585, NM_{—}014173, NM_{—}144596, NM_{—}138925, NM_{—}174889, NM_{—}006452, NM_{—}004689, NM_{—}015315, XM_{—}379904, NM_{—}014753, NM_{—}198309, NM_{—}002810, NM_{—}002388, NM_{—}014938, NM_{—}018031, NM_{—}023007, NM_{—}002362, NM_{—}006088, NM_{—}002014, NM_{—}003823, NM_{—}030877, NM_{—}003752, NM_{—}001456, NM_{—}006286, NM_{—}145685, NM_{—}003103, NM_{—}002265, NM_{—}005915, XM_{—}376630, NM_{—}006295, NM_{—}145810, NM_{—}015456 and combinations thereof.

4. A method of diagnosing whether a subject has, or is at risk for developing, a cancer, comprising: (1) labeling DNA or RNA from a test sample obtained from the subject to provide a set of target oligodeoxynucleotides; (2) hybridizing the target oligodeoxynucleotides to a microarray comprising hypermutated cancer gene-specific probe oligonucleotides to provide a hybridization profile for the test sample; and (3) comparing the test sample hybridization profile to a hybridization profile generated from a control sample, wherein an alteration in the signal of at least one hypermutated cancer gene is indicative of the subject either having, or being at risk for developing, a cancer.

5. The method of claim 4, wherein the signal of at least one hypermutated cancer gene, relative to the signal generated from the control sample, is decreased.

6. The method of claim 4, wherein the signal of at least one hypermutated cancer gene, relative to the signal generated from the control sample, is increased.

7. The method of claim 4, wherein the microarray comprises hypermutated cancer gene-specific probe oligonucleotides for one or more hypermutated cancer genes selected from the group consisting of NM_{—}001273, NM_{—}080921, NM_{—}014865, NM_{—}003072, NM_{—}004104, NM_{—}004990, NM_{—}004599, NM_{—}013417, NM_{—}172230, NM_{—}148842, NM_{—}021948, NM_{—}014014, NM_{—}001417, NM_{—}002271, NM_{—}005030, NM_{—}182917, NM_{—}001923, NM_{—}005762, NM_{—}005348, NM_{—}001418, NM_{—}002266, NM_{—}012218, NM_{—}002466, NM_{—}005557, NM_{—}000691, NM_{—}001569, NM_{—}001090, NM_{—}201524, NM_{—}002291, NM_{—}002230, NM_{—}001605, NM_{—}017647, NM_{—}002541, NM_{—}005438, NM_{—}133645, XM_{—}290401, NM_{—}000968, NM_{—}144733, NM_{—}004741, NM_{—}020414, NM_{—}004793, NM_{—}000224, NM_{—}006819, XM_{—}379877, NM_{—}001436, NM_{—}004247, NM_{—}000967, NM_{—}199413, NM_{—}032044, NM_{—}013403, NM_{—}012469, NM_{—}003169, NM_{—}006470, NM_{—}021991, XM_{—}290506, NM_{—}153280, NM_{—}080686, NM_{—}000289, NM_{—}003875, NM_{—}024658, NM_{—}003074, NM_{—}152298, NM_{—}007126, NM_{—}1139215, NM_{—}147200, XM_{—}290345, XM_{—}377464, NM_{—}021873, NM_{—}006429, NM_{—}015292, NM_{—}005956, NM_{—}001940, NM_{—}000526, NM_{—}001747, NM_{—}024311, NM_{—}003938, NM_{—}005336, NM_{—}003751, NM_{—}006839, NM_{—}000937, NM_{—}012112, NM_{—}006739, NM_{—}005916, NM_{—}138421, NM_{—}001379, NM_{—}006289, NM_{—}004939, NM_{—}001357, NM_{—}000422, NM_{—}002417, NM_{—}005968, NM_{—}003754, XM_{—}378197, NM_{—}002473, NM_{—}002972, NM_{—}000546, NM_{—}001102, XM_{—}374522, NM_{—}001458, NM_{—}172020, XM_{—}039701, NM_{—}000701, NM_{—}002298, NM_{—}015179, NM_{—}002967, NM_{—}018454, NM_{—}006796, NM_{—}005558, NM_{—}006812, NM_{—}003400, NM_{—}001034, NM_{—}004728, NM_{—}178313, NM_{—}145714, XM_{—}085722, NM_{—}001798, NM_{—}181054, NM_{—}001916, NM_{—}002668, NM_{—}052963, NM_{—}031243, NM_{—}002638, NM_{—}003146, NM_{—}005564, NM_{—}016292, XM_{—}375253, NM_{—}003815, NM_{—}001363, NM_{—}032271, NM_{—}000314, NM_{—}198830, NM_{—}032999, NM_{—}015935, NM_{—}134447, NM_{—}006928, NM_{—}014390, NM_{—}020117, NM_{—}001619, NM_{—}022820, NM_{—}005526, NM_{—}033500, NM_{—}001903, NM_{—}004844, NM_{—}006372, NM_{—}022743, NM_{—}007355, NM_{—}012426, NM_{—}000088, NM_{—}182926, NM_{—}004563, NM_{—}014612, NM_{—}004446, XM_{—}168585, NM_{—}014173, NM_{—}144596, NM_{—}138925, NM_{—}174889, NM_{—}006452, NM_{—}004689, NM_{—}015315, XM_{—}379904, NM_{—}014753, NM_{—}198309, NM_{—}002810, NM_{—}002388, NM_{—}014938, NM_{—}018031, NM_{—}023007, NM_{—}002362, NM_{—}006088, NM_{—}002014, NM_{—}003823, NM_{—}030877, NM_{—}003752, NM_{—}001456, NM_{—}006286, NM_{—}145685, NM_{—}003103, NM_{—}002265, NM_{—}005915, XM_{—}376630, NM_{—}006295, NM_{—}145810, NM_{—}015456 and combinations thereof.

8. A method of inhibiting tumorigenesis in a subject who has, or is suspected of
having, a cancer in which at least one hypermutated cancer gene product is down-regulated or up-regulated in the cancer cells of the subject, relative to control cells,
comprising: (1) when the at least one hypermutated cancer gene product or activity is down-regulated in the cancer cells, administering to the subject an effective amount of at least one isolated hypermutated cancer gene product, or an isolated variant or biologically-active fragment thereof, such that tumorigenesis is inhibited in the subject; or (2) when the at least hypermutated cancer gene product or activity is up-regulated in the cancer cells, administering to the subject an effective amount of at least one compound for inhibiting expression of the at least one hypermutated cancer gene product, such that tumorigenesis is inhibited in the subject.

9. The method of claim 8, wherein the at least one isolated hypermutated cancer gene product is selected from the group consisting of NM_{—}001273, NM_{—}080921, NM_{—}014865, NM_{—}003072, NM_{—}004104, NM_{—}004990, NM_{—}004599, NM_{—}013417, NM_{—}172230, NM_{—}148842, NM_{—}021948, NM_{—}014014, NM_{—}001417, NM_{—}002271, NM_{—}005030, NM_{—}182917, NM_{—}001923, NM_{—}005762, NM_{—}005348, NM_{—}001418, NM_{—}002266, NM_{—}012218, NM_{—}002466, NM_{—}005557, NM_{—}000691, NM_{—}001569, NM_{—}001090, NM_{—}201524, NM_{—}002291, NM_{—}002230, NM_{—}001605, NM_{—}017647, NM_{—}002541, NM_{—}005438, NM_{—}133645, XM_{—}290401, NM_{—}000968, NM_{—}144733, NM_{—}004741, NM_{—}020414, NM_{—}004793, NM_{—}000224, NM_{—}006819, XM_{—}379877, NM_{—}001436, NM_{—}004247, NM_{—}000967, NM_{—}199413, NM_{—}032044, NM_{—}013403, NM_{—}012469, NM_{—}003169, NM_{—}006470, NM_{—}021991, XM_{—}290506, NM_{—}153280, NM_{—}080686, NM_{—}000289, NM_{—}003875, NM_{—}024658, NM_{—}003074, NM_{—}152298, NM_{—}007126, NM_{—}139215, NM_{—}147200, XM_{—}290345, XM_{—}377464, NM_{—}021873, NM_{—}006429, NM_{—}015292, NM_{—}005956, NM_{—}001940, NM_{—}000526, NM_{—}001747, NM_{—}024311, NM_{—}003938, NM_{—}005336, NM_{—}003751, NM_{—}006839, NM_{—}000937, NM_{—}012112, NM_{—}006739, NM_{—}005916, NM_{—}138421, NM_{—}001379, NM_{—}006289, NM_{—}004939, NM_{—}001357, NM_{—}000422, NM_{—}002417, NM_{—}005968, NM_{—}003754, XM_{—}378197, NM_{—}002473, NM_{—}002972, NM_{—}000546, NM_{—}001102, XM_{—}374522, NM_{—}001458, NM_{—}172020, XM_{—}039701, NM_{—}000701, NM_{—}002298, NM_{—}015179, NM_{—}002967, NM_{—}018454, NM_{—}006796, NM_{—}005558, NM_{—}006812, NM_{—}003400, NM_{—}001034, NM_{—}004728, NM_{—}178313, NM_{—}145714, XM_{—}085722, NM_{—}001798, NM_{—}181054, NM_{—}001916, NM_{—}002668, NM_{—}052963, NM_{—}031243, NM_{—}002638, NM_{—}003146, NM_{—}005564, NM_{—}016292, XM_{—}375253, NM_{—}003815, NM_{—}001363, NM_{—}032271, NM_{—}000314, NM_{—}198830, NM_{—}032999, NM_{—}015935, NM_{—}134447, NM_{—}006928, NM_{—}014390, NM_{—}020117, NM_{—}001619, NM_{—}022820, NM_{—}005526, NM_{—}033500, NM_{—}001903, NM_{—}004844, NM_{—}006372, NM_{—}022743, NM_{—}007355, NM_{—}012426, NM_{—}000088, NM_{—}182926, NM_{—}004563, NM_{—}014612, NM_{—}004446, XM_{—}168585, NM_{—}014173, NM_{—}144596, NM_{—}138925, NM_{—}174889, NM_{—}006452, NM_{—}004689, NM_{—}015315, XM_{—}379904, NM_{—}014753, NM_{—}198309, NM_{—}002810, NM_{—}002388, NM_{—}014938, NM_{—}018031, NM_{—}023007, NM_{—}002362, NM_{—}006088, NM_{—}002014, NM_{—}003823, NM_{—}030877, NM_{—}003752, NM_{—}001456, NM_{—}006286, NM_{—}145685, NM_{—}003103, NM_{—}002265, NM_{—}005915, XM_{—}376630, NM_{—}006295, NM_{—}145810, NM_{—}015456 and combinations thereof.

10. A method of inhibiting tumorigenesis in a subject who has a cancer, comprising: (1) determining the nucleotide sequence and genomic structure of at least one hypermutated cancer gene product in cancer cells from the subject, relative to control cells; and (2) altering the amount of hypermutated cancer gene product expressed in the cancer cells by: (i) administering to the subject an effective amount of at least one isolated hypermutated cancer gene product, or an isolated variant or biologically-active fragment thereof, if the amount of the hypermutated cancer gene product or activity expressed in the cancer cells is less than the amount of the hypermutated cancer gene product or activity expressed in control cells; or (ii) administering to the subject an effective amount of at least one compound for inhibiting expression or activity of the at least one hypermutated cancer gene product, if the amount of the hypermutated cancer gene product or activity expressed in the cancer cells is greater than the amount of the hypermutated cancer gene product or activity expressed in control cells, such that tumorigenesis is inhibited in the subject.

11. The method of claim 10, wherein the at least one hypermutated cancer gene product is selected from the group consisting of NM_{—}001273, NM_{—}080921, NM_{—}014865, NM_{—}003072, NM_{—}004104, NM_{—}004990, NM_{—}004599, NM_{—}013417, NM_{—}172230, NM_{—}148842, NM_{—}021948, NM_{—}014014, NM_{—}001417, NM_{—}002271, NM_{—}005030, NM_{—}182917, NM_{—}001923, NM_{—}005762, NM_{—}005348, NM_{—}001418, NM_{—}002266, NM_{—}012218, NM_{—}002466, NM_{—}005557, NM_{—}000691, NM_{—}001569, NM_{—}001090, NM_{—}201524, NM_{—}002291, NM_{—}002230, NM_{—}001605, NM_{—}017647, NM_{—}002541, NM_{—}005438, NM_{—}133645, XM_{—}290401, NM_{—}000968, NM_{—}144733, NM_{—}004741, NM_{—}020414, NM_{—}004793, NM_{—}000224, NM_{—}006819, XM_{—}379877, NM_{—}001436, NM_{—}004247, NM_{—}000967, NM_{—}199413, NM_{—}032044, NM_{—}013403, NM_{—}012469, NM_{—}003169, NM_{—}006470, NM_{—}021991, XM_{—}290506, NM_{—}153280, NM_{—}080686, NM_{—}000289, NM_{—}003875, NM_{—}024658, NM_{—}003074, NM_{—}152298, NM_{—}007126, NM_{—}139215, NM_{—}147200, XM_{—}290345, XM_{—}377464, NM_{—}021873, NM_{—}006429, NM_{—}015292, NM_{—}005956, NM_{—}001940, NM_{—}000526, NM_{—}001747, NM_{—}024311, NM_{—}003938, NM_{—}005336, NM_{—}003751, NM_{—}006839, NM_{—}000937, NM_{—}012112, NM_{—}006739, NM_{—}005916, NM_{—}138421, NM_{—}001379, NM_{—}006289, NM_{—}004939, NM_{—}001357, NM_{—}000422, NM_{—}002417, NM_{—}005968, NM_{—}003754, XM_{—}378197, NM_{—}002473, NM_{—}002972, NM_{—}000546, NM_{—}001102, XM_{—}374522, NM_{—}001458, NM_{—}172020, XM_{—}039701, NM_{—}000701, NM_{—}002298, NM_{—}015179, NM_{—}002967, NM_{—}018454, NM_{—}006796, NM_{—}005558, NM_{—}006812, NM_{—}003400, NM_{—}001034, NM_{—}004728, NM_{—}178313, NM_{—}145714, XM_{—}085722, NM_{—}001798, NM_{—}181054, NM_{—}001916, NM_{—}002668, NM_{—}052963, NM_{—}031243, NM_{—}002638, NM_{—}003146, NM_{—}005564, NM_{—}016292, XM_{—}375253, NM_{—}003815, NM_{—}001363, NM_{—}032271, NM_{—}000314, NM_{—}198830, NM_{—}032999, NM_{—}015935, NM_{—}134447, NM_{—}006928, NM_{—}014390, NM_{—}020117, NM_{—}001619, NM_{—}022820, NM_{—}005526, NM_{—}033500, NM_{—}001903, NM_{—}004844, NM_{—}006372, NM_{—}022743, NM_{—}007355, NM_{—}012426, NM_{—}000088, NM_{—}182926, NM_{—}004563, NM_{—}014612, NM_{—}004446, XM_{—}168585, NM_{—}014173, NM_{—}144596, NM_{—}138925, NM_{—}174889, NM_{—}006452, NM_{—}004689, NM_{—}015315, XM_{—}379904, NM_{—}014753, NM_{—}198309, NM_{—}002810, NM_{—}002388, NM_{—}014938, NM_{—}018031, NM_{—}023007, NM_{—}002362, NM_{—}006088, NM_{—}002014, NM_{—}003823, NM_{—}030877, NM_{—}003752, NM_{—}001456, NM_{—}006286, NM_{—}145685, NM_{—}003103, NM_{—}002265, NM_{—}005915, XM_{—}376630, NM_{—}006295, NM_{—}145810, NM_{—}015456 and combinations thereof.

12. A pharmaceutical composition for treating a cancer, comprising at least one isolated hypermutated cancer gene product, or an isolated variant or biologically-active fragment thereof, and a pharmaceutically-acceptable carrier.

13. The pharmaceutical composition of claim 12, wherein the at least one isolated hypermutated cancer gene product corresponds to a hypermutated cancer gene product or activity that is altered in cancer cells relative to suitable control cells.

14. A pharmaceutical composition for treating a cancer, comprising at least one hypermutated cancer gene product activity-inhibition compound and a pharmaceutically-acceptable carrier.

15. The pharmaceutical composition of claim 14, wherein the at least one hypermutated cancer gene product activity-inhibition compound is specific for a hypermutated cancer gene product that is altered in cancer cells relative to suitable control cells.

16. The pharmaceutical composition of claim 15, wherein the at least one hypermutated cancer gene product activity-inhibition compound is specific for a hypermutated cancer gene product selected from the group consisting of NM_{—}001273, NM_{—}080921, NM_{—}014865, NM_{—}003072, NM_{—}004104, NM_{—}004990, NM_{—}004599, NM_{—}013417, NM_{—}172230, NM_{—}148842, NM_{—}021948, NM_{—}014014, NM_{—}001417, NM_{—}002271, NM_{—}005030, NM_{—}182917, NM_{—}001923, NM_{—}005762, NM_{—}005348, NM_{—}001418, NM_{—}002266, NM_{—}012218, NM_{—}002466, NM_{—}005557, NM_{—}000691, NM_{—}001569, NM_{—}001090, NM_{—}201524, NM_{—}002291, NM_{—}002230, NM_{—}001605, NM_{—}017647, NM_{—}002541, NM_{—}005438, NM_{—}133645, XM_{—}290401, NM_{—}000968, NM_{—}144733, NM_{—}004741, NM_{—}020414, NM_{—}004793, NM_{—}000224, NM_{—}006819, XM_{—}379877, NM_{—}001436, NM_{—}004247, NM_{—}000967, NM_{—}199413, NM_{—}032044, NM_{—}013403, NM_{—}012469, NM_{—}003169, NM_{—}006470, NM_{—}021991, XM_{—}290506, NM_{—}153280, NM_{—}080686, NM_{—}000289, NM_{—}003875, NM_{—}024658, NM_{—}003074, NM_{—}152298, NM_{—}007126, NM_{—}139215, NM_{—}147200, XM_{—}290345, XM_{—}377464, NM_{—}021873, NM_{—}006429, NM_{—}015292, NM_{—}005956, NM_{—}001940, NM_{—}000526, NM_{—}001747, NM_{—}024311, NM_{—}003938, NM_{—}005336, NM_{—}003751, NM_{—}006839, NM_{—}000937, NM_{—}012112, NM_{—}006739, NM_{—}005916, NM_{—}138421, NM_{—}001379, NM_{—}006289, NM_{—}004939, NM_{—}001357, NM_{—}000422, NM_{—}002417, NM_{—}005968, NM_{—}003754, XM_{—}378197, NM_{—}002473, NM_{—}002972, NM_{—}000546, NM_{—}001102, XM_{—}374522, NM_{—}001458, NM_{—}172020, XM_{—}039701, NM_{—}000701, NM_{—}002298, NM_{—}015179, NM_{—}002967, NM_{—}018454, NM_{—}006796, NM_{—}005558, NM_{—}006812, NM_{—}003400, NM_{—}001034, NM_{—}004728, NM_{—}178313, NM_{—}145714, XM_{—}085722, NM_{—}001798, NM_{—}181054, NM_{—}001916, NM_{—}002668, NM_{—}052963, NM_{—}031243, NM_{—}002638, NM_{—}003146, NM_{—}005564, NM_{—}016292, XM_{—}375253, NM_{—}003815, NM_{—}001363, NM_{—}032271, NM_{—}000314, NM_{—}198830, NM_{—}032999, NM_{—}015935, NM_{—}134447, NM_{—}006928, NM_{—}014390, NM_{—}020117, NM_{—}001619, NM_{—}022820, NM_{—}005526, NM_{—}033500, NM_{—}001903, NM_{—}004844, NM_{—}006372, NM_{—}022743, NM_{—}007355, NM_{—}012426, NM_{—}000088, NM_{—}182926, NM_{—}004563, NM_{—}014612, NM_{—}004446, XM_{—}168585, NM_{—}014173, NM_{—}144596, NM_{—}138925, NM_{—}174889, NM_{—}006452, NM_{—}004689, NM_{—}015315, XM_{—}379904, NM_{—}014753, NM_{—}198309, NM_{—}002810, NM_{—}002388, NM_{—}014938, NM_{—}018031, NM_{—}023007, NM_{—}002362, NM_{—}006088, NM_{—}002014, NM_{—}003823, NM_{—}030877, NM_{—}003752, NM_{—}001456, NM_{—}006286, NM_{—}145685, NM_{—}003103, NM_{—}002265, NM_{—}005915, XM_{—}376630, NM_{—}006295, NM_{—}145810, NM_{—}015456 and combinations thereof.

17. A method of identifying an inhibitor of tumorigenesis, comprising providing a test agent to a cell and determining the nucleotide sequence and gene structure of at least one hypermutated cancer gene product associated with cancers, wherein an alteration in the hypermutated cancer gene activity in the cell, relative to a suitable control cell, is indicative of the test agent being an inhibitor of tumorigenesis.

18. The method of claim 17, wherein the hypermutated cancer gene product is selected from the group consisting of NM_{—}001273, NM_{—}080921, NM_{—}014865, NM_{—}003072, NM_{—}004104, NM_{—}004990, NM_{—}004599, NM_{—}013417, NM_{—}172230, NM_{—}148842, NM_{—}021948, NM_{—}014014, NM_{—}001417, NM_{—}002271, NM_{—}005030, NM_{—}182917, NM_{—}001923, NM_{—}005762, NM_{—}005348, NM_{—}001418, NM_{—}002266, NM_{—}012218, NM_{—}002466, NM_{—}005557, NM_{—}000691, NM_{—}001569, NM_{—}001090, NM_{—}201524, NM_{—}002291, NM_{—}002230, NM_{—}001605, NM_{—}017647, NM_{—}002541, NM_{—}005438, NM_{—}133645, XM_{—}290401, NM_{—}000968, NM_{—}144733, NM_{—}004741, NM_{—}020414, NM_{—}004793, NM_{—}000224, NM_{—}006819, XM_{—}379877, NM_{—}001436, NM_{—}004247, NM_{—}000967, NM_{—}199413, NM_{—}032044, NM_{—}013403, NM_{—}012469, NM_{—}003169, NM_{—}006470, NM_{—}021991, XM_{—}290506, NM_{—}153280, NM_{—}080686, NM_{—}000289, NM_{—}003875, NM_{—}024658, NM_{—}003074, NM_{—}152298, NM_{—}007126, NM_{—}139215, NM_{—}147200, XM_{—}290345, XM_{—}377464, NM_{—}021873, NM_{—}006429, NM_{—}015292, NM_{—}005956, NM_{—}001940, NM_{—}000526, NM_{—}001747, NM_{—}024311, NM_{—}003938, NM_{—}005336, NM_{—}003751, NM_{—}006839, NM_{—}000937, NM_{—}012112, NM_{—}006739, NM_{—}005916, NM_{—}138421, NM_{—}001379, NM_{—}006289, NM_{—}004939, NM_{—}001357, NM_{—}000422, NM_{—}002417, NM_{—}005968, NM_{—}003754, XM_{—}378197, NM_{—}002473, NM_{—}002972, NM_{—}000546, NM_{—}001102, XM_{—}374522, NM_{—}001458, NM_{—}172020, XM_{—}039701, NM_{—}000701, NM_{—}002298, NM_{—}015179, NM_{—}002967, NM_{—}018454, NM_{—}006796, NM_{—}005558, NM_{—}006812, NM_{—}003400, NM_{—}001034, NM_{—}004728, NM_{—}178313, NM_{—}145714, XM_{—}085722, NM_{—}001798, NM_{—}181054, NM_{—}001916, NM_{—}002668, NM_{—}052963, NM_{—}031243, NM_{—}002638, NM_{—}003146, NM_{—}005564, NM_{—}016292, XM_{—}375253, NM_{—}003815, NM_{—}001363, NM_{—}032271, NM_{—}000314, NM_{—}198830, NM_{—}032999, NM_{—}015935, NM_{—}134447, NM_{—}006928, NM_{—}014390, NM_{—}020117, NM_{—}001619, NM_{—}022820, NM_{—}005526, NM_{—}033500, NM_{—}001903, NM_{—}004844, NM_{—}006372, NM_{—}022743, NM_{—}007355, NM_{—}012426, NM_{—}000088, NM_{—}182926, NM_{—}004563, NM_{—}014612, NM_{—}004446, XM_{—}168585, NM_{—}014173, NM_{—}144596, NM_{—}138925, NM_{—}174889, NM_{—}006452, NM_{—}004689, NM_{—}015315, XM_{—}379904, NM_{—}014753, NM_{—}198309, NM_{—}002810, NM_{—}002388, NM_{—}014938, NM_{—}018031, NM_{—}023007, NM_{—}002362, NM_{—}006088, NM_{—}002014, NM_{—}003823, NM_{—}030877, NM_{—}003752, NM_{—}001456, NM_{—}006286, NM_{—}145685, NM_{—}003103, NM_{—}002265, NM_{—}005915, XM_{—}376630, NM_{—}006295, NM_{—}145810, NM_{—}015456 and combinations thereof.
